(19) United States
(12) Patent Application Publication
(10) Pub. No.: US 2020/0017588 A1
(43) Pub. Date: Jan. 16, 2020

(54) MODULAR TETRAVALENT BISPECIFIC ANTIBODY PLATFORM

(71) Applicant: Dana-Farber Cancer Institute, Inc., Boston, MA (US)

(72) Inventor: Wayne A. Marasco, Wellesley, MA (US)

(21) Appl. No.: 16/340,878

(22) PCT Filed: Oct. 16, 2017
(86) PCT No.: PCT/US2017/056814

§ 371 Date: Apr. 10, 2019

Related U.S. Application Data
(60) Provisional application No. 62/408,271, filed on Oct. 14, 2016.

(51) Int. Cl. C07K 16/28; C07K 16/46

(52) U.S. Cl. CPC C07K 16/2827; C07K 16/2878; C07K 16/468; C07K 2317/31; C07K 2317/524; C07K 2319/00; C07K 2317/622; C07K 2317/64; C07K 2317/732; C07K 2317/734; C07K 2317/53

(57) ABSTRACT

The present invention relates to a tetrameric bispecific antibody molecule, as well as a method for producing the same, its use and a nucleic acid molecule encoding the tetrameric bispecific antibody molecule.

### RELATED APPLICATIONS

[0001] This application claims benefit of, and priority to, U.S. Ser. No. 62/408,271 filed on Oct. 14, 2016 the contents of which is hereby incorporated by reference its entirety.

### GOVERNMENT INTEREST

[0002] This invention was made with government support under [ ] awarded by the [ ]. The government has certain rights in the invention.

### FIELD OF THE INVENTION

[0003] The present invention relates generally to tetrameric bispecific antibody molecules, methods and systems of producing same.

### SEQUENCE LISTING

[0004] The instant application contains a Sequence Listing which has been filed electronically in ASCII format and is hereby incorporated by reference in its entirety. Said ASCII copy, created on May 30, 2019, is named 5031461-038-US2_SL.txt and is 1,002,845 bytes in size.

### BACKGROUND OF THE INVENTION

[0005] Bispecific antibodies (BsAb) are antibodies or antibody-like molecules having two different binding specificities. BsAbs have broad applications in biomedicine, especially in immunotherapy for tumors. Presently, a focus of immunotherapy research is on how to utilize cell-mediated cytotoxicity of BsAb to kill tumor cells. A BsAb can be designed to target a tumor cell and an effector cell simultaneously, while triggering the effector cell's destruction of the tumor cell.

[0006] BsAb can be prepared by methods such as chemical engineering, cell engineering and genetic engineering. An advantage of genetic engineering is that the antibodies can be easily modified, which renders design and production of many different forms of bispecific antibody fragments, including diabodies, tandem ScFv, and single-chain diabodies, as well as derivatives thereof. Since those BsAbs do not have an IgG Fc domain, their small size enhances their penetration into tumors, but they have significantly shorter half-life in vivo and also lack the ADCC effect that is associated with the constant region of the antibody.

[0007] To improve the stability and therapeutic potential, recombinant genetic modifications were made in the heavy chains to facilitate their heterodimerization and to produce greater yields of Fc-containing IgG-like bispecific antibodies. Several rational design strategies have been used to engineer antibody CH3 chains for heterodimerization, namely disulfide bonds, salt bridges, knobs-into-holes. The bases for creating knob and hole in the juxtaposed positions is that the knob and hole interaction will favor heterodimer formation, whereas the knob-knob and the hole-hole interaction will prevent homodimers formation due to the deletion of favorable interactions. While this knob-into-holes approach solves the heavy chain homodimerization problem, it did not address the issues regarding mispairing between the light chain and heavy chains from two different antibodies. Although it is possible to identify identical light chains for two different antibodies, the possibility of BsAb construction using two antibody sequences that can share the common light chain is very limited.

[0008] There is a need to provide better BsAbs that are easier to prepare, have better clinical stability and efficacy and/or reduced systematic toxicity.

### SUMMARY OF THE INVENTION

[0009] The present invention provides tBsAbs that are easier to prepare, have better clinical stability and efficacy, and/or reduced systematic toxicity.

[0010] One aspect of the present invention relates to a tetravalent antibody molecule. The tetravalent antibody may be a dimer of a bispecific scFv fragment including a first binding site for a first antigen, a second binding site for a second antigen. The two binding sites may be joined together via a linker domain. In embodiments, the scFv fragment is a tandem scFv, the linker domain includes an immunoglobulin hinge region (e.g., an IgG1, an IgG2, an IgG3, and an IgG4 hinge region) amino acid sequence. In embodiments, the immunoglobulin hinge region amino acid sequence may flanked by a flexible linker amino acid sequence, e.g., having the amino acid sequence (GGGS)_{X1-6} (SEQ ID NO: 1906), (GGGGS)_{X1-6} (SEQ ID NO: 1907), and GSAGSAAGSGEF (SEQ ID NO: 1908). In embodiments, the linker domain includes at least a portion of an immunoglobulin Fc domain, e.g., an IgG1, an IgG2, an IgG3, and an IgG4 Fc domain. The at least a portion of the immunoglobulin Fc domain may be a CH2 domain. The Fc domain may be linked to the C-terminus of an immunoglobulin hinge region (e.g., an IgG1, an IgG2, an IgG3, and an IgG4 hinge region) amino acid sequence. The linker domain may include a flexible linker amino acid sequence (e.g., (GGGS)_{X1-6} (SEQ ID NO: 1906), (GGGGS)_{X1-6} (SEQ ID NO: 1907), and GSAGSAAGSGEF (SEQ ID NO: 1908)) at one terminus or at both termini.

[0011] Another aspect, the present invention relates to nucleic acid construct. The construct may include nucleic acid molecules encoding: a light chain variable region and a heavy chain variable region of an antibody that can specifically bind to a first antigen; a light chain variable region and a heavy chain variable region of an antibody that can specifically bind to a second antigen; and a linker domain. In embodiments, the linker domain is an immunoglobulin hinge region (e.g., an IgG1, an IgG2, an IgG3, and an IgG4 hinge region) amino acid sequence. In embodiments, the linker domain is at least a portion of an immunoglobulin Fc domain, e.g., an IgG1, an IgG2, an IgG3, and an IgG4 Fc domain. The at least a portion of the immunoglobulin Fc domain may be a CH2 domain. The Fc domain may be linked to the C-terminus of an immunoglobulin hinge region (e.g., an IgG1, an IgG2, an IgG3, and an IgG4 hinge region) amino acid sequence. The linker domain may include a flexible linker amino acid sequence (e.g., (GGGS)X1-6 (SEQ ID NO: 1906), (GGGGS)X1-6 (SEQ ID NO: 1907), and GSAGSAAGSGEF (SEQ ID NO: 1908)) at one terminus or at both termini.

[0012] Yet another aspect of the present invention is a vector including the nucleic acid construct of the above aspect.

[0013] Another aspect of the present invention is a host cell (e.g., a T-cell, a B-cell, a follicular T-cell, and an NK-cell) which includes the vector of the above aspect.

[0014] An aspect of the present invention is a chimeric antigen receptor (CAR). The CAR may include an intracellular signaling domain, a transmembrane domain and an extracellular domain including the tetravalent antibody molecule of any of the above aspects or embodiments. In embodiments, the transmembrane domain further includes a stalk region positioned between the extracellular domain and the transmembrane domain and/or the transmembrane domain comprises CD28. In embodiments, the CAR further includes one or more additional costimulatory molecules (e.g., CD28, 4-1BB, ICOS, and OX40) positioned between the transmembrane domain and the intracellular signaling domain, e.g., a CD3 zeta chain.

[0015] Yet another aspect of the present invention is a genetically engineered cell. The genetically engineered cell may express and bear on its cell surface membrane the chimeric antigen receptor of an above aspect or embodiment. In embodiments, the cell is a T-cell (e.g., CD4+ and/or CD8+) or an NK cell. The cell may comprise a mixed population of CD4+ and CD8 cells+.

[0016] An aspect of the present invention is method for treating a disease or disorder. The method may include administering the tetravalent antibody molecule of an above aspect or embodiment. In embodiments, the disease or disorder is a CNS-related disease or disorder, e.g., a CNS cancer or a neurodegenerative disease. The CNS cancer may be a Glioblastoma (GBM). The neurodegenerative disease may be Amyotrophic Lateral Sclerosis, Parkinson's Disease, Alzheimer's Disease, or Huntington's Disease. In embodiments, the tetravalent antibody molecule recognizes and/or is bound by a CNS transport receptor, e.g., a transferrin receptor (TfR), VCAM-1, CD98hc, and an insulin receptor. In this aspect and any above aspect or embodiment, the tetravalent antibody molecule augments transport across the blood brain barrier.

[0017] Any of the above aspects or embodiments may be combined with any other aspect or embodiment.

[0018] Unless otherwise defined, all technical and scientific terms used herein have the same meaning as commonly understood by one of ordinary skill in the art to which this invention pertains. Although methods and materials similar or equivalent to those described herein can be used in the practice of the present invention, suitable methods and materials are described below. All publications, patent applications, patents, and other references mentioned herein are expressly incorporated by reference in their entirety. In cases of conflict, the present specification, including definitions, will control. In addition, the materials, methods, and examples described herein are illustrative only and are not intended to be limiting.

[0019] Other features and advantages of the invention will be apparent from and encompassed by the following detailed description and claims.

### BRIEF DESCRIPTION OF THE DRAWINGS

[0020] FIG. 1 is an illustration showing the design and formation of a tetrameric bispecific antibody (tBsAb).

[0021] FIG. 2 is a schematic representation of the pcDNA3.1\1 scFv-hinge—scFv expression vector.

[0022] FIG. 3A is an SDS gel showing a synthetic tetramer linker that was digested using NotI and BsiWI and then inserted into tetramer expressing vector. FIG. 3B is an SDS gel showing the purification of a tBsAb according to the invention.

[0023] FIG. 4A is an illustration showing the method for detection of antibody binding affinity of a tBsAb. FIG. 4B to FIG. 4C are graphs showing data when plates were coated with CCR4-Fc (B) or with PD-L1-Fc (C) and then incubated with tetravalent bispecific (anti-CCR4 and anti-PD-L1) and control antibodies. The result showed this tetravalent antibody could bind to both CCR4-Fc and PD-L1-Fc in a dose dependent manner.

[0024] FIG. 5 is a graph showing that anti-CAIX-PD-L1 bispecific mAb binds to CAIX-Fc fusion protein.

[0025] FIG. 6 is a graph showing that anti-CAIX-PD-L1 bispecific mAb binds to PD-L1-Fc fusion protein.

[0026] FIG. 7A is an illustration of how linker lengths can be changed to optimize bispecific mAb binding. FIG. 7A discloses SEQ ID NOS 1910-1912, respectively, in order of appearance. FIG. 7B is a schematic of a tBsAb sequence. FIG. 7B discloses SEQ ID NOS 1913-1915, respectively, in order of appearance.

[0027] FIG. 8A. αGITR-αPD-L1 tBsAb engagement. The tBsAb binds to the GITR protein on T cells and PD-L1 protein on tumor cells. B. Schematic representation of the tBsAb format which is achieved through interchain disulfide bond formation between cysteine residues of the hinge region.

[0028] FIG. 9A. Basic structure of the two scFvs linked to form the tBsAb. Figure discloses “His6” as SEQ ID NO: 1084. FIG. 9B. Bispecific dimeric taFv directed against GITR and PD-L1. Each V_{H} and V_{L} pair is connected by a linker of 15 residues to form scFv. Two scFv are connected by a linker-hinge-linker (55 residues). The hinge region has two cysteine residues allowing the pairing of two taFv through disulfide bridges under oxidative conditions.

[0029] FIG. 10A. Basic structure of the tandem scFv. Figure discloses “His6” as SEQ ID NO: 1084. FIG. 10B. Trifunctional tBsAb directed against GITR and PD-L1 with an additional CH2 domain. Each V_{H} and V_{L} pair is connected by linker of 15 residues. Two scFv are connected by a linker-hinge-CH2-linker domain. The hinge region has two cysteine residues allowing the pairing of two tandem scFv through disulfide bridges under oxidative conditions. The N-terminal end of the CH2 domain can bind Fc-γ or C1q. The resulting format is a trifunctional tBsAb.

[0030] FIG. 11 Mechanism of action of αGITR-αPD-L1 tBsAb. FIG. 11A. Tumor cells overexpress the PD-L1 protein. The PD-1/PD-L1 interaction inhibits an effective T cell activation and promotes immune suppression and adaptive immune resistance. FIG. 11B. The αGITR-αPD-L1 tBsAb may enhance immune response. The αPD-L1 arm blocks PD-1/PD-L1 pathway and may therefore inhibit T cell exhaustion and abrogate T reg suppression. The αGITR arm acts as an agonist on the co-stimulator GITR receptor, resulting in upregulation of GITR expression enhancing T cell activation and proliferation.

[0031] FIG. 12 Schematic representation of the αGITR-αPD-L1 cloning process. The donor vector and the pcDNA 3.4 expression vector were digested with SfiI and NotI restriction enzymes. The V_{H}GITR-V_{L}GITR gene was isolated and subsequently ligated to each other. The final plasmid resulted in the αGITR-αPD-L1 clone.

[0032] FIG. 13 Schematic representation of the control plasmid (1) cloning process. The pcDNA3.1 vector and the expression vector pcDNA 3.4 were digested with SfiI and NotI restriction enzymes. The V_{H}F10-V_{L}F10 gene was isolated and subsequently ligated to the pcDNA 3.4 expression vector. The final plasmid resulted in the αGITR-αPD-L1 clone.

[0033] FIG. 14 Schematic representation of the control plasmids (2) and (3) cloning process. The isolated F10 V_{H} and V_{L} DNA and the recipient vector pcDNA 3.4 were digested with BsiWI and BamHI restriction enzymes and subsequently ligated to each other. The final plasmid resulted in the final αGITR1-αPD-L1 and αGITR10-αPD-L1 clone.

[0034] FIG. 15 Schematic representation of the cloning strategy for the αGITR-αPD-L1 with CH2 construct. The HindIII restriction site was introduced into the pcDNA 3.4 expression vector by site directed mutagenesis. The isolated CH2 fragment and the expression vector were subsequently digested and ligated to each other to finalize the construct αGITR-αPD-L1 with CH2.

[0035] FIG. 16 Restriction enzyme analysis (REA) of recipient pcDNA 3.4 vector, six V_{H}GITR-V_{L}GITR inserts and one V_{H}F10-V_{L}F10 insert. Shown is an ethidium bromide stained 1% agarose gel of DNA electrophoresed in TAE buffer. All plasmids were digested with SfiI and NotI restriction enzymes. Lane 1: shown is a 7.5 kb digested recipient pcDNA 3.4 vector. The lower band between 500 and 1000 bp is a previously-used scFv insert (from the Marasco Laboratory). Lanes 2-6: Lower bands represent the 800 bp V_{H}GITR-linker-V_{L}GITR inserts. The larger bands clustered at 8 kb are the double digested descendent vectors. Lane 7: The 800 bp V_{H}F10-linker-V_{L}F10 inserts is visualized in the lower band clustered between 500 and 1000 bp. The lane “bp” represents the 1 kb DNA ladder (NEB).

[0036] FIG. 17 REA of V_{H}F10-linker-V_{L}F10 cDNA and recipient pcDNA 3.4 expression (containing V_{H}GITR1-V_{L}GITR1 or V_{H}GITR10-V_{L}GITR10, respectively). Shown is an ethidium bromide stained 1% agarose gel of DNA electrophoresed in TAE buffer. The recipient expression vectors and the insert were digested with BsiWI and BamHI restriction enzymes. Lane 1: shown is a single band clustered at 800 bp, representing the V_{H}F10-linker-V_{L}F10 (scFv) fragment isolated by PCR. Lanes 2 and 3: The upper two bands visualize the pcDNA 3.4 expression vectors containing V_{H}GITR1-V_{L}GITR1 (lane 2) and V_{H}GITR10-V_{L}GITR10 (lane 3). Both comprise 7500 bp and can be detected at the correct level of the ladder. The lower bands in lanes 2 and 3 clustered between 500 and 1000 bp represent the digested V_{H}PD-L1-V_{L}PD-L1 fragment separated from its vector. The lane “bp” corresponds to the 1 kb DNA ladder (NEB).

[0037] FIG. 18 Analysis of purified tBsAbs by SDS-PAGE. Shown is a Coomassie blue stained SDS gel of protein electrophoresed in MES buffer. 3-5 μg of protein sample was loaded and separated on the gel under (A) reducing and (B) non-reducing conditions. Lanes 1-8: Under non-reducing conditions, the SDS PAGE revealed two major bands of each protein. The higher bands have an apparent molecular weight between 80 kDa and 115 kDa and the lower molecular weight bands between 70 and 80 kDa. In the non-reduced SDS-gel analysis, some weak but high molecular weight bands (>180 kDa) can be observed. The SDS-gel analysis under reducing conditions (10% DTT; 70° C. for 10 minutes) displays only one band with an apparent molecular weight between 70 and 80 kDa. Lane 9: Under non-reducing conditions, a single band is shown with an apparent molecular weight slightly over 140 kDa. The visualization of two bands under reducing conditions emphasizes the correct expression of αGITR IgG that display separated heavy and light chains (50 kDa and 25 kDa). The lanes kDa represent the benchmark pre-stained protein ladder (Invitrogen) under the corresponding conditions (4-12% gel concentration run in MES buffer).

[0038] FIG. 19 ELISA absorbance values of αGITR-αPD-L1 tBsAbs, F10-αPD-L1 tBsAb and αPD-L1 mAb tested against passively immobilized PD-L1 antigen. A concentration range of each αGITR-αPD-L1 (0.0001 mg/mL-1 mg/mL; horizontal axis) was subjected to ELISA on PD-L1 antigen. The results show the mean and standard deviation of the absorbance at 450 nm (vertical axis). Each sample was run in triplicates at every concentration. The raw signal intensity was corrected for the background signal by subtracting the mean signal of wells incubated in the absence of the primary antibody from the wells where primary antibody was added.

[0039] FIG. 20 Cell-based ELISA testing αGITR1-αPD-L1 and αGITR10-αPD-L1 antibodies binding against GITR+ expressing CF2 cells fixed with acetone-methanol. The F10-αPD-L1 antibody represents the negative control. All antibodies were tested using a range of serial 1:3 dilutions ranging from 3.3 mg/mL to 0.0046 mg/mL. All antibodies were tested against 1000 GITR+CF2 cells per well. Each bar represents an average obtained from triplicate samples (deviations indicated by bars). The raw signal intensity was corrected for the background signal by subtracting the mean signal of wells incubated in the absence of the primary antibody from the wells where primary antibody was added.

[0040] FIG. 21 Cell based ELISA testing αGITR1-αPD-L1 and αGITR10-αPD-L1 antibodies binding against GITR+ expressing CF2 cells fixed with 8% paraformaldehyde. The F10-αPD-L1 antibody represents the negative control. All antibodies were tested using a range of serial 1:3 dilutions ranging from 3.3 mg/mL to 0.0046 mg/mL. All antibodies were tested against 1000 GITR+CF2 cells per well. Each bar represents an average obtained from triplicate samples (deviations indicated by bars). The raw signal intensity was corrected for the background signal by subtracting the mean signal of wells incubated in the absence of the primary antibody from the wells where primary antibody was added.

[0041] FIG. 22 Cell-based ELISA testing αGITR10-αPD-L1 and commercial αGITR10 mAb antibodies binding against GITR+ expressing CF2 cells fixed with 8% paraformaldehyde. The F10-αPD-L1 antibody represents the negative control. All antibodies were tested using a range of serial 1:2 dilutions ranging from 5 mg/mL to 0.078 mg/mL. All antibodies were tested against 10,000 GITR+CF2 cells per well. Each bar represents an average obtained from triplicate samples (deviations indicated by bars). The raw signal intensity was corrected for the background signal by subtracting the mean signal of wells incubated in the absence of the primary antibody from the wells where primary antibody was added.

[0042] FIG. 23A. Flow cytometric analysis of fluorescent-activated αGITR10-αPD-L1 tBsAb (anti-His Alexa 488 (APC) conjugated) tested with GITR+CF2 cells. FIG. 23B. Flow cytometric analysis of fluorescent-activated αGITR10 IgG Ab (anti human IgG Fc (FITC conjugated) tested with GITR+CF2 cells. Horizontal lines indicate the intensity signal of fluorescence and the vertical axis indicates the cell counts. Each individual picture represents different concentration of αGITR10-αPD-L1 with constant cell number.

[0043] FIG. 24A. Flow cytometric analysis of fluorescent-activated αGITR1-αPD-L1 tBsAb (anti-His Alexa 488 (APC) conjugated) tested with GITR+CF2 cells. FIG. 24B. Flow cytometric analysis of fluorescent-activated αGITR10 IgG Ab (anti human IgG Fc (FITC conjugated) tested with GITR+CF2 cells. Horizontal lines indicate the intensity signal of fluorescence and the vertical axis indicates the cell counts. Each individual picture represents different concentration of αGITR10-αPD-L1 (FIG. 24A) and αGITR10 IgG (FIG. 24B) with constant cell number.

[0044] FIG. 25 Restriction enzyme analysis (REA) of 16 clones. Shown is an ethidium bromide stained 1% agarose gel of DNA electrophoresed in TAE buffer. All plasmids were digested with HindIII and BamHI restriction enzymes. Two bands are shown in lane No.10: The band clustered between 6 kb and 8 kb represents the digested recipient pcDNA 3.4 vector (7.5 kb). The lower band between 500 and 1000 bp indicates a close approximation to the expected theoretical size of 800 bp of the fragment isolated with HindIII and BamHI restriction enzymes. The lane “bp” represents the 1 kb DNA ladder.

[0045] FIG. 26 REA of clone 10 (GITR10-PDL1 with HindIII) and GITR10-PDL1 (without HindIII restriction site). Shown is an ethidium bromide stained 1% agarose gel of DNA electrophoresed in TAE buffer. Both plasmids were digested with only HindIII (lane 1), only NotI (lane 2) and with HindIII and NotI simultaneously (lane 3). The digestions of clone No.10 with a single enzyme (lanes 1 & 2) resulted one band clustered around 8000 bp. The digestion of clone No. 10 with both enzymes (lane 3) resulted in the generation of two fragments, of which the smaller-sized band is clustered below 500 bp. The digestion of αGITR10-αPD-L1 with only HindIII restriction site (lane 1), revealed a supercoiled plasmid DNA.

[0046] FIG. 27 Restriction enzyme digestion analysis of vector GITR10-PDL1 (containing HindIII restriction site) and CH2 fragment. Shown is an ethidium bromide stained 1% agarose gel of DNA electrophoresed in TAE buffer. Lane 1: single digestion of the αGITR-αPD-L1 with HindIII. Lane 2: The CH2 fragment digested with HindIII resulted in a band clustered below the 500 bp mark of the ladder. The lane “bp” corresponds to the 1 kb DNA ladder.

[0047] FIG. 28 Analysis of purified αGITR10-αPD-L1 with CH2 BsAb by SDS-PAGE. Shown is a Coomassie blue stained SDS gel of protein electrophoresed in MES buffer. 3-5 μg of protein sample was loaded and separated on the gel under (R) reducing and (NR) non-reducing conditions. Under non-reducing conditions, the SDS PAGE revealed two major bands of each protein. The higher band has an apparent molecular of around 140 kDa and the lower hand has a molecular weight of 80 kDa, correlating with the theoretical size of dimeric (150 kDa) and monomeric (75 kDa) BsAbs. The SDS-gel analysis under reducing conditions (10% DTT; 70° C. for 10 minutes) displays only one band with an apparent molecular weight between around 80 kDa and reinforces the correct expression of tBsAb that can be reduced by its disulfide bridges in the hinge region. The lane “kDa” represents the benchmark pre-stained protein ladder (Invitrogen) under the corresponding conditions (4-12% gel concentration run in MES buffer).

[0048] FIG. 29 Cell-based ELISA testing αGITR10-αPD-L1 with CH2 and αGITR10 IgG antibodies binding against GITR+ expressing CF2 cells fixed with 8% paraformaldehyde. The F10-αPD-L1 antibody represents the negative control. All antibodies were tested using a range of serial 1:2 dilutions ranging from 5 mg/mL to 0.16 mg/mL. All antibodies were tested against 10,000 GITR+CF2 cells per well. Each bar represents an average obtained from triplicate samples (deviations indicated by bars). The raw signal intensity was corrected for the background signal by subtracting the mean signal of wells incubated in the absence of the primary antibody from the wells where primary antibody was added.

[0049] FIG. 30 ADCC activity of αGITR10-αPD-L1 with CH2 antibody. The ADCC activity of αGITR10-αPD-L1 with CH2 and was measured at varying concentrations. All antibodies were serially diluted (1:2), starting the highest concentration at 20 mg/mL until 0.02 mg/mL and tested against 20,000 GITR+CF2 cells per well. The ratio of effector cells (GITR+CF2) to target cells (Wils-2) was 5:1. The αGITR IgG represents the positive control and F10-αPD-L1 the negative control. The vertical axis represents the raw value of luciferase activity in the effector cell quantified with luminescence readout. Each sample was run in triplicate at every concentration; the mean standard deviation is indicated in brackets. The background of GITR+CF2 cells in RPMI medium was subtracted from the obtained values.

[0050] FIG. 31 αGITR10-αPD-L1 with CH2 antibody mediated CDC activity via mouse complement. Percentage of GITR+CF2 cell lysis obtained with serial dilutions of αGITR10-αPD-L1 tBsAb and the controls αGITR mAb (positive), αGITR10-αPD-L1 (negative) determined by the CDC assay. All antibodies were serially diluted (1:10), starting the highest concentration at 20 mg/mL until 0.2 mg/mL and tested against 10,000 GITR+CF2 cells per well. The vertical axis represents the percentage of lysis. It is calculated as ratio of obtained sample signal to the signal intensity from fully lysed GITR+CF2 cells. Each sample was run in triplicate at every concentration; the mean standard deviation is indicated in brackets. The background of GITR+CF2 cells in RPMI medium was subtracted from the obtained values. Each bar represents the simple average obtained from triplicate samples (standard deviations indicated by brackets).

[0051] FIG. 32 Cell-based ELISA testing αGITR1-αPD-L1 and αGITR10-αPD-L1 antibodies binding against CF2 cells (without GITR expression) fixed with 8% paraformaldehyde. The F10-αPD-L1 antibody represents the negative control. All antibodies were tested using a range of serial 1:3 dilutions ranging from 3.3 mg/mL to 0.0046 mg/mL. All antibodies were tested against 1000 GITR-CF2 cells per well. Each bar represents an average obtained from triplicate samples (deviations indicated by bars). The raw signal intensity was corrected for the background signal by subtracting the mean signal of wells incubated in the absence of the primary antibody from the wells where primary antibody was added.

[0052] FIG. 33 Cell-based ELISA testing αGITR10-αPD-L1 and αGITR10 IgG antibodies binding against CF2 cells (without GITR expression) fixed with 8% paraformaldehyde. The F10-αPD-L1 antibody represents the negative control. All antibodies were tested using a range of serial 1:2 dilutions ranging from 5 mg/mL to 0.078 mg/mL. All antibodies were tested against 10,000 GITR-CF2 cells per well. Each bar represents an average obtained from triplicate samples (deviations indicated by bars). The raw signal intensity was corrected for the background signal by subtracting the mean signal of wells incubated in the absence of the primary antibody from the wells where primary antibody was added.

[0053] FIG. 34 Cell-based ELISA testing αGITR10-αPD-L1 with CH2 and αGITR10 IG antibodies binding against GITR−CF2 cells fixed with 8% paraformaldehyde. The F10-αPD-L1 antibody represents the negative control. All antibodies were tested using a range of serial 1:2 dilutions ranging from 5 mg/mL to 0.16 mg/mL. All antibodies were tested against 10,000 GITR+CF2 cells per well. Each bar represents an average obtained from triplicate samples (deviations indicated by bars). The raw signal intensity was corrected for the background signal by subtracting the mean signal of wells incubated in the absence of the primary antibody from the wells where primary antibody was added.

[0054] FIG. 35 Control set-up for Flow cytometric analysis of fluorescent-activated αGITR1-αPD-L1 antibody. Lanes 1 to 6 show the controls set up for GITR+ CF2 cells. Lanes 7 to 9 refer to the controls set up for GITR− CF2 cells.

### DETAILED DESCRIPTION OF THE INVENTION

[0055] The invention relates to bispecific antibody contains two binding sites for each receptor (i.e. a tetravalent bispecific antibody or “tBsAb”), systems and methods of producing same.

[0056] The clinical development of bispecific antibodies (BsAb) as therapeutics has been hampered by the difficulty in preparing the materials in sufficient quantity and quality by traditional methods. In recent years, a variety of recombinant methods have been developed for efficient production of BsAb, both as antibody fragments and as full-length IgG-like molecules. These recombinant antibody molecules possess dual antigen-binding capability with, in most cases, monovalency to each of their target antigens. The present invention provides an efficient approach for the production of a novel tetravalent BsAb (tBsAb), with two antigen-binding sites to each of its target antigens, genetically engineering a scFV bispecific antibody and fusing the two together.

[0057] Compared to the bispecific/divalent antibody, the tBsAb binds more efficiently to both of its target antigens and is more efficacious in blocking ligand binding to the receptors. Additionally, expression of the tBsAb in mammalian cells yielded higher level of production and better antibody activity. Importantly, the tBsAbs' exhibit higher stability and longer half-life compared to monovalent bispecific antibodies. One drawback of monovalent bispecific antibodies is their small size and therefor short serum half-life requiring administration in continuous low doses for several weeks. In contrast, the longer half-life of the tBsAbs of the invention solves this problem and therefore more suitable for clinical applications. This design and expression for tBsAb should be applicable to any pair of antigen specificities.

[0058] Preferably, the tBsAb is specific for BMCA, CAIX, CCR4, PD-L1, PD-L2, PD1, Glucocorticoid-Induced Tumor Necrosis Factor Receptors (GITR), Severe acute respiratory syndrome (SARS), influenza, flavivirus or Middle East Respiratory Syndrome (MERS).

[0059] Exemplary antibodies useful in constructing the tBsAb according to the invention includes antibodies disclosed in for example: WO/2005/060520, WO/2006/089141, WO/2007/065027, WO/2009/086514, WO/2009/079259, WO/2011/153380, WO/2014/055897, WO 2015/143194, WO 2015/164865, WO 2013/166500, WO 2014/144061, WO 2016/057488, WO 2016/054638, WO/2016/164835, PCT/US2016/026232, PCT/US2017/050093, PCT/US2017/050327 and PCT/US2017/043504 the contents of which are hereby incorporated by reference in their entireties.

[0060] PDL1 (68)

[0061] Exemplary anti-PDL1 antibodies include antibodies having a _{VH} nucleotide sequence having SEQ ID NO: 1485 and a _{VL} nucleotide sequence having SEQ ID NO: 1487; a VH nucleotide sequence having SEQ ID NO: 1485 and a VL nucleotide sequence having SEQ ID NO: 1487; a VH nucleotide sequence having SEQ ID NO: 1489 and a VL nucleotide sequence having SEQ ID NO: 1491; a VH nucleotide sequence having SEQ ID NO: 1493 and a VL nucleotide sequence having SEQ ID NO: 1495; a VH nucleotide sequence having SEQ ID NO: 1497 and a VL nucleotide sequence having SEQ ID NO: 1499; a VH nucleotide sequence having SEQ ID NO: 1501 and a VL nucleotide sequence having SEQ ID NO: 1503; a VH nucleotide sequence having SEQ ID NO: 1505 and a VL nucleotide sequence having SEQ ID NO: 1507; a VH nucleotide sequence having SEQ ID NO: 1509 and a VL nucleotide sequence having SEQ ID NO: 1511; a VH nucleotide sequence having SEQ ID NO: 1513 and a VL nucleotide sequence having SEQ ID NO: 1515; a VH nucleotide sequence having SEQ ID NO: 1517 and a VL nucleotide sequence having SEQ ID NO: 1519; a VH nucleotide sequence having SEQ ID NO: 1521 and a VL nucleotide sequence having SEQ ID NO: 1523; a VH nucleotide sequence having SEQ ID NO: 1525 and a VL nucleotide sequence having SEQ ID NO: 1527; a VH nucleotide sequence having SEQ ID NO: 1529 and a VL nucleotide sequence having SEQ ID NO: 1531; a VH nucleotide sequence having SEQ ID NO: 1533 and a VL nucleotide sequence having SEQ ID NO: 1535; a VH nucleotide sequence having SEQ ID NO: 1537 and a VL nucleotide sequence having SEQ ID NO: 1539.

[0062] Exemplary anti-PDL1 antibodies include antibodies having a _{VH} amino acid sequence having SEQ ID NO: 970 and a _{VL} amino acid sequence having SEQ ID NO: 971; a VH amino acid having SEQ ID NO: 1486 and a VL polypeptide sequence having SEQ ID NO: 1488 a VH amino acid having SEQ ID NO: 1490 and a VL polypeptide sequence having SEQ ID NO: 1492 a VH amino acid having SEQ ID NO: 1494 and a VL polypeptide sequence having SEQ ID NO: 1496 a VH amino acid having SEQ ID NO: 1498 and a VL polypeptide sequence having SEQ ID NO: 1500 a VH amino acid having SEQ ID NO: 1502 and a VL polypeptide sequence having SEQ ID NO: 1504 a VH amino acid having SEQ ID NO: 1506 and a VL polypeptide sequence having SEQ ID NO: 1508 a VH amino acid having SEQ ID NO: 1510 and a VL polypeptide sequence having SEQ ID NO: 1512 a VH amino acid having SEQ ID NO: 1514 and a VL polypeptide sequence having SEQ ID NO: 1516 a VH amino acid having SEQ ID NO: 1518 and a VL polypeptide sequence having SEQ ID NO: 1520 a VH amino acid having SEQ ID NO: 1522 and a VL polypeptide sequence having SEQ ID NO: 1524 a VH amino acid having SEQ ID NO: 1526 and a VL polypeptide sequence having SEQ ID NO: 1528 a VH amino acid having SEQ ID NO: 1530 and a VL polypeptide sequence having SEQ ID NO: 1532 a VH amino acid having SEQ ID NO: 1534 and a VL polypeptide sequence having SEQ ID NO: 1536 a VH amino acid having SEQ ID NO: 1538 and a VL polypeptide sequence having SEQ ID NO: 1540.

[0063] In other embodiments the anti-PDL1 antibodies have a heavy chain with three CDRs including the amino acid sequences SEQ ID NO: 1541, 1554, 1569 respectively and a light chain with three CDRs including the amino acid sequences 1584, 1599, 1610 respectively; or a heavy chain with three CDRs comprising the amino acid sequences 1543, 1556, 1571 and a light chain with three CDRs comprising the amino acid sequences 1586, 1600, 1612; or a heavy chain with three CDRs comprising the amino acid sequences 1544, 1557, 1572 and a light chain with three CDRs comprising the amino acid sequences 1587, 1601, 1613; or a heavy chain with three CDRs comprising the amino acid sequences 1545, 1558, 1573 and a light chain with three CDRs comprising the amino acid sequences 1588, 1602, 1614; or a heavy chain with three CDRs comprising the amino acid sequences 1546, 1559, 1574 and a light chain with three CDRs comprising the amino acid sequences 1589, 1603, 1615; or a heavy chain with three CDRs comprising the amino acid sequences 1547, 1560, 1575 and a light chain with three CDRs comprising the amino acid sequences 1590, 1604, 1616; or a heavy chain with three CDRs comprising the amino acid sequences 1548, 1561, 1576 and a light chain with three CDRs comprising the amino acid sequences 1591, 1605, 1617; or a heavy chain with three CDRs comprising the amino acid sequences 1541, 1562, 1577 and a light chain with three CDRs comprising the amino acid sequences 1592, 1599, 1618; or a heavy chain with three CDRs comprising the amino acid sequences 1549, 1563, 1578 and a light chain with three CDRs comprising the amino acid sequences 1593, 1606, 1619; or a heavy chain with three CDRs comprising the amino acid sequences 1550, 1564, 1579 and a light chain with three CDRs comprising the amino acid sequences 1594, 1607, 1620; or a heavy chain with three CDRs comprising the amino acid sequences 1551, 1565, 1580 and a light chain with three CDRs comprising the amino acid sequences 1595, 1599, 1621; or a heavy chain with three CDRs comprising the amino acid sequences 1542, 1566, 1581 and a light chain with three CDRs comprising the amino acid sequences 1596, 1599, 1622; or a heavy chain with three CDRs comprising the amino acid sequences 1552, 1567, 1582 and a light chain with three CDRs comprising the amino acid sequences 1597, 1608, 1623; or a heavy chain with three CDRs comprising the amino acid sequences 1553, 1568, 1583 and a light chain with three CDRs comprising the amino acid sequences 1598, 1609 1624.

[0064] SARS (26)

[0065] Exemplary SARS neutralizing antibodies include antibodies having a _{VH} nucleotide sequence having SEQ ID NO: 1626 and a _{VL} nucleotide sequence having SEQ ID NO: 1628; a VH nucleotide sequence having SEQ ID NO: 1630 and a VL nucleotide sequence having SEQ ID NO: 1639; a VH nucleotide sequence having SEQ ID NO: 1634 and a VL nucleotide sequence having SEQ ID NO: 1640; a VH nucleotide sequence having SEQ ID NO: 1632 and a VL nucleotide sequence having SEQ ID NO: 1641; a VH nucleotide sequence having SEQ ID NO: 1633 and a VL nucleotide sequence having SEQ ID NO: 1642; a VH nucleotide sequence having SEQ ID NO: 1634 and a VL nucleotide sequence having SEQ ID NO: 1643; a VH nucleotide sequence having SEQ ID NO: 1635 and a VL nucleotide sequence having SEQ ID NO: 1644; a VH nucleotide sequence having SEQ ID NO: 1636 and a VL nucleotide sequence having SEQ ID NO: 1645; a VH nucleotide sequence having SEQ ID NO: 1637 and a VL nucleotide sequence having SEQ ID NO: 1646

[0066] CXCR4 (33)

[0067] Exemplary anti-CXCR4 antibody include antibodies having a VH amino acid sequence having SEQ ID NO: 771 and a VL amino acid sequence having SEQ ID NO: 779; a VH amino acid sequence having SEQ ID NO: 772 and a VL amino acid sequence having SEQ ID NO: 780; a VH amino acid sequence having SEQ ID NO: 773 and a VL amino acid sequence having SEQ ID NO: 781; a VH amino acid sequence having SEQ ID NO: 774 and a VL amino acid sequence having SEQ ID NO: 782; a VH amino acid sequence having SEQ ID NO: 775 and a VL amino acid sequence having SEQ ID NO: 783; a VH amino acid sequence having SEQ ID NO: 776 and a VL amino acid sequence having SEQ ID NO: 784; a VH amino acid sequence having SEQ ID NO: 777 and a VL amino acid sequence having SEQ ID NO: 785; or a VH amino acid sequence having SEQ ID NO: 778 and a VL amino acid sequence having SEQ ID NO: 786.

[0068] In other embodiments the anti-CXCR4 antibodies have a heavy chain with three CDRs including the amino acid sequences SEQ ID NO: 803, 804, 805 respectively and a light chain with three CDRs including the amino acid sequences 806, 807, 808 respectively; or a heavy chain with three CDRs comprising the amino acid sequences 809, 810, 811, respectively and a light chain with three CDRs comprising the amino acid sequences 812, 813, 814, respectively; or a heavy chain with three CDRs comprising the amino acid sequences 815, 816, 817 respectively and a light chain with three CDRs comprising the amino acid sequences 818, 819, 820 respectively; or a heavy chain with three CDRs comprising the amino acid sequences 827, 828, 829 respectively and a light chain with three CDRs comprising the amino acid sequences 830, 831, 832 respectively; or a heavy chain with three CDRs comprising the amino acid sequences 833, 834, 835, respectively and a light chain with three CDRs comprising the amino acid sequences 836, 837, 838, respectively; or a heavy chain with three CDRs comprising the amino acid sequences 839, 840, 841 respectively and a light chain with three CDRs comprising the amino acid sequences 842, 843, 844 respectively.

[0069] Carbonic Anhydrase IX (40)

[0070] Exemplary anti-CA IX antibodies include antibodies having a _{VH} amino acid sequence having SEQ ID NO: 845 and a _{VL} amino acid sequence having SEQ ID NO: 846; a VH amino acid sequence having SEQ ID NO: 847 and a VL amino acid sequence having SEQ ID NO: 868; a VH amino acid sequence having SEQ ID NO: 848 and a VL amino acid sequence having SEQ ID NO: 869; a VH amino acid sequence having SEQ ID NO: 849 and a VL amino acid sequence having SEQ ID NO: 870; a VH amino acid sequence having SEQ ID NO: 850 and a VL amino acid sequence having SEQ ID NO: 871; a VH amino acid sequence having SEQ ID NO: 851 and a VL amino acid sequence having SEQ ID NO: 872; a VH amino acid sequence having SEQ ID NO: 852 and a VL amino acid sequence having SEQ ID NO: 873; a VH amino acid sequence having SEQ ID NO: 853 and a VL amino acid sequence having SEQ ID NO: 874; a VH amino acid sequence having SEQ ID NO: 854 and a VL amino acid sequence having SEQ ID NO: 875; a VH amino acid sequence having SEQ ID NO: 855 and a VL amino acid sequence having SEQ ID NO: 876; a VH amino acid sequence having SEQ ID NO: 856 and a VL amino acid sequence having SEQ ID NO: 877; a VH amino acid sequence having SEQ ID NO: 857 and a VL amino acid sequence having SEQ ID NO: 878; a VH amino acid sequence having SEQ ID NO: 858 and a VL amino acid sequence having SEQ ID NO: 879; a VH amino acid sequence having SEQ ID NO: 859 and a VL amino acid sequence having SEQ ID NO: 880; a VH amino acid sequence having SEQ ID NO: 860 and a VL amino acid sequence having SEQ ID NO: 881; a VH amino acid sequence having SEQ ID NO: 861 and a VL amino acid sequence having SEQ ID NO: 882 a VH amino acid sequence having SEQ ID NO: 862 and a VL amino acid sequence having SEQ ID NO: 883; a VH amino acid sequence having SEQ ID NO: 863 and a VL amino acid sequence having SEQ ID NO: 884; a VH amino acid sequence having SEQ ID NO: 864 and a VL amino acid sequence having SEQ ID NO: 885; a VH amino acid sequence having SEQ ID NO: 865 and a VL amino acid sequence having SEQ ID NO: 886; a VH amino acid sequence having SEQ ID NO: 866 and a VL amino acid sequence having SEQ ID NO: 887; a VH amino acid sequence having SEQ ID NO: 867 and a VL amino acid sequence having SEQ ID NO: 888.

[0071] In other embodiments the anti-CA IX antibodies have a heavy chain with three CDRs including the amino acid sequences SEQ ID NO: 803, 804, 805 respectively and a light chain with three CDRs including the amino acid sequences 806, 807, 808 respectively; or a heavy chain with three CDRs comprising the amino acid sequences 899, 915, 909 and a light chain with three CDRs comprising the amino acid sequences 905, 906, 952 or a heavy chain with three CDRs comprising the amino acid sequences 899, 915, 909 and a light chain with three CDRs comprising the amino acid sequences 935, 943, 953 or a heavy chain with three CDRs comprising the amino acid sequences 899, 915, 909 and a light chain with three CDRs comprising the amino acid sequences 935, 906, 954 or a heavy chain with three CDRs comprising the amino acid sequences 910, 916, 923 and a light chain with three CDRs comprising the amino acid sequences 936, 944, 955 or a heavy chain with three CDRs comprising the amino acid sequences 899, 915, 909 and a light chain with three CDRs comprising the amino acid sequences 936, 944, 956 or a heavy chain with three CDRs comprising the amino acid sequences 911, 917, 924 and a light chain with three CDRs comprising the amino acid sequences 937, 945, 957 or a heavy chain with three CDRs comprising the amino acid sequences 899, 915, 909 and a light chain with three CDRs comprising the amino acid sequences 935, 946, 958 or a heavy chain with three CDRs comprising the amino acid sequences 899, 915, 909 and a light chain with three CDRs comprising the amino acid sequences 938, 946, 959 or a heavy chain with three CDRs comprising the amino acid sequences 899, 915, 909 and a light chain with three CDRs comprising the amino acid sequences 905, 946, 960 or a heavy chain with three CDRs comprising the amino acid sequences 899, 918, 925 and a light chain with three CDRs comprising the amino acid sequences 937, 947, 955 or a heavy chain with three CDRs comprising the amino acid sequences 899, 918, 926 and a light chain with three CDRs comprising the amino acid sequences 937, 945, 957 or a heavy chain with three CDRs comprising the amino acid sequences 912, 919, 927 and a light chain with three CDRs comprising the amino acid sequences 937, 943, 961 or a heavy chain with three CDRs comprising the amino acid sequences 899, 918, 928 and a light chain with three CDRs comprising the amino acid sequences 937, 906, 960 or a heavy chain with three CDRs comprising the amino acid sequences 899, 918, 928 and a light chain with three CDRs comprising the amino acid sequences 937, 906, 960 or a heavy chain with three CDRs comprising the amino acid sequences 913, 920, 929 and a light chain with three CDRs comprising the amino acid sequences 939, 948, 962 or a heavy chain with three CDRs comprising the amino acid sequences 899, 918, 930 and a light chain with three CDRs comprising the amino acid sequences 935, 944, 955 or a heavy chain with three CDRs comprising the amino acid sequences 899, 921, 931 and a light chain with three CDRs comprising the amino acid sequences 935, 944, 955 or a heavy chain with three CDRs comprising the amino acid sequences 912, 919, 932 and a light chain with three CDRs comprising the amino acid sequences 940, 949, 963 or a heavy chain with three CDRs comprising the amino acid sequences 899, 915, 909 and a light chain with three CDRs comprising the amino acid sequences 935, 943, 960 or a heavy chain with three CDRs comprising the amino acid sequences 914, 922, 933 and a light chain with three CDRs comprising the amino acid sequences 941, 950, 964 or a heavy chain with three CDRs comprising the amino acid sequences 912, 918, 934 and a light chain with three CDRs comprising the amino acid sequences 942, 951, 965.

[0072] CC-Chemokine Receptor 4 (CCR4) (048)

[0073] Exemplary CC-chemokine receptor 4 (CCR4) antibodies include antibodies having a _{VH} nucleotide sequence having SEQ ID NO: 969 and a _{VL} nucleotide sequence having SEQ ID NO: 971; a _{VH} nucleotide sequence having SEQ ID NO: 969 and a V_{L} nucleotide sequence having SEQ ID NO: 972.

[0074] Exemplary CCR4 antibodies include antibodies having a _{VH} amino acid sequence having SEQ ID NO: 970 and a _{VL} amino acid sequence having SEQ ID NO: 971.

[0075] In other embodiments the CCR4 antibodies have a heavy chain with three CDRs including the amino acid sequences SEQ ID NO: 973, 974, 975 respectively and a light chain with three CDRs including the amino acid sequences 976, 977, 978 respectively.

[0076] Middle East Respiratory Syndrome Coronavirus (MERS-CoV). (85)

[0077] Exemplary anti-Middle East Respiratory Syndrome coronavirus (MERS-CoV) antibody include antibodies having a VH nucleotide sequence having SEQ ID NO: 677 and a VL nucleotide sequence having SEQ ID NO:679; a VH nucleotide sequence having SEQ ID NO: 681 and a VL nucleotide sequence having SEQ ID NO:683; a VH nucleotide sequence having SEQ ID NO: 685 and a VL nucleotide sequence having SEQ ID NO:687; a VH nucleotide sequence having SEQ ID NO: 689 and a VL nucleotide sequence having SEQ ID NO:692; a VH nucleotide sequence having SEQ ID NO: 693 and a VL nucleotide sequence having SEQ ID NO:695; a VH nucleotide sequence having SEQ ID NO: 697 and a VL nucleotide sequence having SEQ ID NO:699; and a VH nucleotide sequence having SEQ ID NO: 701 and a VL nucleotide sequence having SEQ ID NO:703.

[0078] Exemplary anti-Middle East Respiratory Syndrome coronavirus (MERS-CoV) antibody include antibodies having a VH amino acid sequence SEQ ID NO: 678 and a VL amino acid sequence having SEQ ID NO: 680; a VH amino acid sequence SEQ ID NO: 682 and a VL amino acid sequence having SEQ ID NO: 684; a VH amino acid sequence SEQ ID NO: 686 and a VL amino acid sequence having SEQ ID NO: 688; a VH amino acid sequence SEQ ID NO: 690 and a VL amino acid sequence having SEQ ID NO: 692; a VH amino acid sequence SEQ ID NO: 694 and a VL amino acid sequence having SEQ ID NO: 696; a VH amino acid sequence SEQ ID NO: 698 and a VL amino acid sequence having SEQ ID NO: 700; and a VH amino acid sequence SEQ ID NO: 702 and a VL amino acid sequence having SEQ ID NO: 704.

[0079] In other embodiments the anti-Middle East Respiratory Syndrome coronavirus (MERS-CoV) antibody has a heavy chain with three CDRs including the amino acid sequences of 705, 706, and 707 and a light chain with three CDRs including the amino acid sequences 722, 723, and 724; a heavy chain with three CDRs including the amino acid sequences of 708, 709, and 710 and a light chain with three CDRs including the amino acid sequences 725, 726, and 727; a heavy chain with three CDRs including the amino acid sequences of 711, 712, and 713 and a light chain with three CDRs including the amino acid sequences 728, 729, and 730; a heavy chain with three CDRs including the amino acid sequences of 711, 735, and 715 and a light chain with three CDRs including the amino acid sequences 731, 732, and 733; a heavy chain with three CDRs including the amino acid sequences of 711, 735, and 716 and a light chain with three CDRs including the amino acid sequences 737, 738, and 739; a heavy chain with three CDRs including the amino acid sequences of 717, 718, and 719 and a light chain with three CDRs including the amino acid sequences 736, 742, and 743; and a heavy chain with three CDRs including the amino acid sequences of 714, 720, and 721 and a light chain with three CDRs including the amino acid sequences 740, 729, and 741.

[0080] GITR (93)

[0081] Exemplary anti-human GITR antibody include antibodies having a VH nucleotide sequence having SEQ ID NO: 1361 and a VL nucleotide sequence having SEQ ID NO: 1363; a VH nucleotide sequence having SEQ ID NO: 1365 and a VL nucleotide sequence having SEQ ID NO:1367; a VH nucleotide sequence having SEQ ID NO: 1369 and a VL nucleotide sequence having SEQ ID NO: 1371; a VH nucleotide sequence having SEQ ID NO: 1381 and a VL nucleotide sequence having SEQ ID NO: 1375; a VH nucleotide sequence having SEQ ID NO: 1377 and a VL nucleotide sequence having SEQ ID NO: 1379; a VH nucleotide sequence having SEQ ID NO: 1381 and a VL nucleotide sequence having SEQ ID NO: 1383; a VH nucleotide sequence having SEQ ID NO: 1385 and a VL nucleotide sequence having SEQ ID NO: 1387; a VH nucleotide sequence having SEQ ID NO: 1389 and a VL nucleotide sequence having SEQ ID NO:1391; a VH nucleotide sequence having SEQ ID NO: 1393 and a VL nucleotide sequence having SEQ ID NO: 1395; a VH nucleotide sequence having SEQ ID NO: 1397 and a VL nucleotide sequence having SEQ ID NO: 1398; or a VH nucleotide sequence having SEQ ID NO: 1401 and a VL nucleotide sequence having SEQ ID NO: 1403.

[0082] Exemplary anti-human GITR antibody include antibodies having a VH amino acid sequence having SEQ ID NO: 1362 and a VL amino acid sequence having SEQ ID NO: 1364; a VH amino acid having SEQ ID NO: 1366 and a VL polypeptide sequence having SEQ ID NO:1368; a VH amino acid sequence having SEQ ID NO: 1371 and a VL amino acid sequence having SEQ ID NO: 1372; a VH amino acid sequence having SEQ ID NO: 1382 and a VL amino acid sequence having SEQ ID NO: 1376; a VH nucleotide sequence having SEQ ID NO: 1378 and a VL nucleotide sequence having SEQ ID NO: 1380; a VH amino acid having SEQ ID NO: 1382 and a VL polypeptide sequence having SEQ ID NO: 1384; a VH amino acid sequence having SEQ ID NO: 1386 and a VL amino acid sequence having SEQ ID NO: 1388; a VH amino acid sequence having SEQ ID NO: 1390 and a VL amino acid sequence having SEQ ID NO: 1392; a VH amino acid having SEQ ID NO: 1394 and a VL polypeptide sequence having SEQ ID NO: 1396; a VH amino acid sequence having SEQ ID NO: 1399 and a VL amino acid sequence having SEQ ID NO: 1400; or a VH amino acid sequence having SEQ ID NO: 1402 and a VL amino acid sequence having SEQ ID NO: 1404.

[0083] In other embodiments the anti-human GITR antibody has a heavy chain with three CDRs including the amino acid sequences 1405, 1406, and 1407 and a light chain with three CDRs including the amino acid sequences1408, 1409, and 1410 respectively; a heavy chain with three CDRs including the amino acid sequences 1411, 1412, and 1413 and a light chain with three CDRs including the amino acid sequences1414, 1415, and 1416 respectively; a heavy chain with three CDRs including the amino acid sequences 1417, 1418, and 1419 and a light chain with three CDRs including the amino acid sequences 1420, 1421, and 1422 respectively; a heavy chain with three CDRs including the amino acid sequences 1423, 1424, and 1425 and a light chain with three CDRs including the amino acid sequences 1426, 1427, and 1428 respectively; a heavy chain with three CDRs including the amino acid sequences 1429, 1430, and 1431 and a light chain with three CDRs including the amino acid sequences 1432, 1433, and 1434 respectively; a heavy chain with three CDRs including the amino acid sequences 1435, 1436, and 1437 and a light chain with three CDRs including the amino acid sequences 1438, 1439, and 1440 respectively; a heavy chain with three CDRs including the amino acid sequences 1441, 1442, and 1443 and a light chain with three CDRs including the amino acid sequences 1444, 1445, and 1446 respectively; a heavy chain with three CDRs including the amino acid sequences 1447, 1448, and 1449 and a light chain with three CDRs including the amino acid sequences 1450, 1451, and 1452 respectively; a heavy chain with three CDRs including the amino acid sequences 1453, 1454, and 1455 and a light chain with three CDRs including the amino acid sequences 1456, 1457, and 1458 respectively; a heavy chain with three CDRs including the amino acid sequences 1459, 1460, and 1461 and a light chain with three CDRs including the amino acid sequences 1462, 1463, and 1464 respectively; or a heavy chain with three CDRs including the amino acid sequences 1465, 1466, and 1467 and a light chain with three CDRs including the amino acid sequences 1468, 1469, and 1470 respectively.

[0084] Flavivirus (73)

[0085] Exemplary anti-West Nile virus envelope protein E (WNE) antibody include antibodies having a VH nucleotide sequence having a VH amino acid sequence having SEQ ID NO: 1224 and a VL amino acid sequence having SEQ ID NO: 1226.

[0086] Exemplary anti-West Nile virus envelope protein E (WNE) antibody include antibodies having a VH nucleotide sequence having SEQ ID NO: 1225 and a VL nucleotide sequence having SEQ ID NO: 1227.

[0087] In other embodiments the anti-West Nile virus envelope protein E (WNE) antibody has a heavy chain with three CDRs including the amino acid sequences 1244, 1245, and 1246 and a light chain with three CDRs including the amino acid sequences 1247, 1248, and 1249 respectively.

[0088] CCR4 (65)

[0089] Exemplary anti-CC-chemokine receptor 4 (CCR4) antibody include antibodies having a _{VH} nucleotide sequence having SEQ ID NO: 1329 and a _{VL} nucleotide sequence having SEQ ID NO: 1331; a _{VH} nucleotide sequence having SEQ ID NO: 1333 and a V_{L} nucleotide sequence having SEQ ID NO:1335; a _{VH} nucleotide sequence having SEQ ID NO: 1337 and a V_{L} nucleotide sequence having SEQ ID NO: 1192; a _{VH} nucleotide sequence having SEQ ID NO: 1341 and a _{VL} nucleotide sequence having SEQ ID NO: 1343; or a _{VH} nucleotide sequence having SEQ ID NO: 1357 and a _{VL} nucleotide sequence having SEQ ID NO:1359.

[0090] Exemplary anti-CC-chemokine receptor 4 (CCR4) antibody include antibodies having a V_{H} amino acid sequence having SEQ ID NO: 1330 and a V_{L} amino acid sequence having SEQ ID NO: 1332; a V_{H} amino acid sequence having SEQ ID NO: 1334 and a V_{L} amino acid sequence having SEQ ID NO: 1336; a V_{H} amino acid sequence having SEQ ID NO: 1338 and a V_{L} amino acid sequence having SEQ ID NO: 1340; a V_{H} amino acid sequence having SEQ ID NO: 1342 and a V_{L} amino acid sequence having SEQ ID NO: 1344; or a V_{H} amino acid sequence having SEQ ID NO: 1358 and a V_{L} amino acid sequence having SEQ ID NO: 1360.

[0091] In other embodiments the anti-CC-chemokine receptor 4 (CCR4) antibody has a heavy chain with three CDRs including the amino acid sequences 1203, 1208, and 1211 and a light chain with three CDRs including the amino acid sequences 1207, 1209, and 1216 respectively; or a heavy chain with three CDRs including the amino acid sequences 1204, 1208, and 1212 and a light chain with three CDRs including the amino acid sequences 1207, 1209, and 1217 respectively; or a heavy chain with three CDRs including the amino acid sequences 1204, 1208, and 1213 and a light chain with three CDRs including the amino acid sequences 1207, 1209, and 1217 respectively; or a heavy chain with three CDRs including the amino acid sequences 1205, 1208, and 1214 and a light chain with three CDRs including the amino acid sequences 1207, 1209, and 1218 respectively; or a heavy chain with three CDRs including the amino acid sequences 1206, 1208, and 1210 and a light chain with three CDRs including the amino acid sequences 1207, 1209, and 1220 respectively; or a heavy chain with three CDRs including the amino acid sequences 1202, 1208, and 1210 and a light chain with three CDRs including the amino acid sequences 1207, 1209, and 1219 respectively.

[0092] Human Immunoglobulin Heavy Chain Variable Region Germline Gene VH1-69 (57)

[0093] Exemplary anti-human immunoglobulin heavy chain variable region germline gene VH1-69 antibody include antibodies having a VH nucleotide sequence having SEQ ID NO: 1153 and a VL nucleotide sequence having SEQ ID NO: 1155; or a VH nucleotide sequence having SEQ ID NO: 1163 and a VL nucleotide sequence having SEQ ID NO:1155.

[0094] Exemplary anti-human immunoglobulin heavy chain variable region germline gene VH1-69 antibody include antibodies having a V_{H} amino acid sequence having SEQ ID NO: 1154 and a V_{L} amino acid sequence having SEQ ID NO: 1156; or a V_{H} amino acid sequence having SEQ ID NO: 1164 and a V_{L} amino acid sequence having SEQ ID NO: 1156.

[0095] In other embodiments the anti-human immunoglobulin heavy chain variable region germline gene VH1-69 antibody has a heavy chain with three CDRs including the amino acid sequences 1157, 1158, and 1159 and a light chain with three CDRs including the amino acid sequences 1160, 1161, and 1162 respectively.

[0096] Influenza (49)

[0097] Exemplary anti-influenza antibody include antibodies having a VH nucleotide sequence having SEQ ID NO: 981 and a VL nucleotide sequence having SEQ ID NO: 983; a VH nucleotide sequence having SEQ ID NO: 985 and a VL nucleotide sequence having SEQ ID NO: 989; a VH nucleotide sequence having SEQ ID NO: 987 and a VL nucleotide sequence having SEQ ID NO: 991; a VH nucleotide sequence having SEQ ID NO: 993 and a VL nucleotide sequence having SEQ ID NO: 997; a VH nucleotide sequence having SEQ ID NO: 995 and a VK nucleotide sequence having SEQ ID NO: 999; a VH nucleotide sequence having SEQ ID NO: 1001 and a VL nucleotide sequence having SEQ ID NO: 1005; a VH nucleotide sequence having SEQ ID NO: 1003 and a VL nucleotide sequence having SEQ ID NO: 1007; a VH nucleotide sequence having SEQ ID NO: 1009 and a VL nucleotide sequence having SEQ ID NO: 1011; a VH nucleotide sequence having SEQ ID NO: 1013 and a VL nucleotide sequence having SEQ ID NO: 1015; and a VH nucleotide sequence having SEQ ID NO: 1017 and a VK nucleotide sequence having SEQ ID NO: 1019; a VH nucleotide sequence having SEQ ID NO: 1020 and a VL nucleotide sequence having SEQ ID NO: 1022.

[0098] Exemplary anti-influenza antibody include antibodies having a VH amino acid sequence having SEQ ID NO: 982 and a VL amino acid sequence having SEQ ID NO: 984; a VH amino acid sequence having SEQ ID NO: 986 and a VL amino acid sequence having SEQ ID NO: 988; a VH amino acid sequence having SEQ ID NO: 986 and a VL amino acid sequence having SEQ ID NO: 990; a VH amino acid sequence having SEQ ID NO: 992 and a VL amino acid sequence having SEQ ID NO: 994; a VH amino acid sequence having SEQ ID NO: 992 and a VK amino acid sequence having SEQ ID NO: 996; a VH amino acid sequence having SEQ ID NO: 998 and a VL amino acid sequence having SEQ ID NO: 1000; a VH amino acid sequence having SEQ ID NO: 998 and a VL amino acid sequence having SEQ ID NO: 1002; a VH amino acid sequence having SEQ ID NO: 1004 and a VL amino acid sequence having SEQ ID NO: 1006; a VH amino acid sequence having SEQ ID NO: 1008 and a VL amino acid sequence having SEQ ID NO: 1010; a VH amino acid sequence having SEQ ID NO: 1012 and a VK amino acid sequence having SEQ ID NO: 1014; and a VH amino acid sequence having SEQ ID NO: 1016 and a VL amino acid sequence having SEQ ID NO: 1018.

[0099] In other embodiments the anti-influenza antibody has a heavy chain with three CDRs including the amino acid sequences of 1023, 1031, and 1039 and a light chain with three CDRs including the amino acid sequences 1047, 1059, and 1071; a heavy chain with three CDRs including the amino acid sequences of 1023, 1032, and 1040 and a light chain with three CDRs including the amino acid sequences 1048, 1060, and 1072; a heavy chain with three CDRs including the amino acid sequences of 1025, 1032, and 1040 and a light chain with three CDRs including the amino acid sequences 1057, 1069, and 1081; a heavy chain with three CDRs including the amino acid sequences of 1026, 1033, and 1041 and a light chain with three CDRs including the amino acid sequences 1049, 1061, and 1073; a heavy chain with three CDRs including the amino acid sequences of 1026, 1033, and 1041 and a light chain with three CDRs including the amino acid sequences 1054, 1066, and 1078; a heavy chain with three CDRs including the amino acid sequences of 1027, 1034, and 1042 and a light chain with three CDRs including the amino acid sequences 1050, 1062, and 1074; a heavy chain with three CDRs including the amino acid sequences of 1027, 1034, and 1042 and a light chain with three CDRs including the amino acid sequences 1056, 1068, and 1080; a heavy chain with three CDRs including the amino acid sequences of 1028, 1035, and 1043 and a light chain with three CDRs including the amino acid sequences 1051, 1063, and 1065; a heavy chain with three CDRs including the amino acid sequences of 1028, 1036, and 1044 and a light chain with three CDRs including the amino acid sequences 1052, 1064, and 1076; a heavy chain with three CDRs including the amino acid sequences of 1029, 1037, and 1045 and a light chain with three CDRs including the amino acid sequences 1053, 1065, and 1077; or a heavy chain with three CDRs including the amino acid sequences of 1030, 1038, and 1046 and a light chain with three CDRs including the amino acid sequences 1058, 1070, and 1082.

[0100] Influenza (78)

[0101] Exemplary anti-influenza antibodies include antibodies having a _{VH} nucleotide sequence having SEQ ID NO: 397 and a _{VL} nucleotide sequence having SEQ ID NO: 398; a vx nucleotide sequence having SEQ ID NO: 399 and a V_{L} nucleotide sequence having SEQ ID NO:400; a _{VH} nucleotide sequence having SEQ ID NO: 401 and a V_{L} nucleotide sequence having SEQ ID NO: 402; a _{VH} nucleotide sequence having SEQ ID NO: 403 and a _{VL} nucleotide sequence having SEQ ID NO: 404; or a _{VH} nucleotide sequence having SEQ ID NO: 405 and a _{VL} nucleotide sequence having SEQ ID NO:406; or a _{VH} nucleotide sequence having SEQ ID NO: 407 and a _{VL} nucleotide sequence having SEQ ID NO:408; or a _{VH} nucleotide sequence having SEQ ID NO: 409 and a _{VL} nucleotide sequence having SEQ ID NO:410; or a _{VH} nucleotide sequence having SEQ ID NO: 411 and a _{VL} nucleotide sequence having SEQ ID NO:412; or a _{VH} nucleotide sequence having SEQ ID NO: 413 and a _{VL} nucleotide sequence having SEQ ID NO:414; or a _{VH} nucleotide sequence having SEQ ID NO: 415 and a _{VL} nucleotide sequence having SEQ ID NO:416; or a _{VH} nucleotide sequence having SEQ ID NO: 417 and a _{VL} nucleotide sequence having SEQ ID NO:418; or a _{VH} nucleotide sequence having SEQ ID NO: 419 and a _{VL} nucleotide sequence having SEQ ID NO:420; or a _{VH} nucleotide sequence having SEQ ID NO: 421 and a _{VL} nucleotide sequence having SEQ ID NO:422; or a _{VH} nucleotide sequence having SEQ ID NO: 423 and a _{VL} nucleotide sequence having SEQ ID NO:424; or a _{VH} nucleotide sequence having SEQ ID NO: 425 and a _{VL} nucleotide sequence having SEQ ID NO:426; or a _{VH} nucleotide sequence having SEQ ID NO: 427 and a _{VL} nucleotide sequence having SEQ ID NO:428; or a _{VH} nucleotide sequence having SEQ ID NO: 429 and a _{VL} nucleotide sequence having SEQ ID NO:430; or a _{VH} nucleotide sequence having SEQ ID NO: 431 and a _{VL} nucleotide sequence having SEQ ID NO:432; or a _{VH} nucleotide sequence having SEQ ID NO: 433 and a _{VL} nucleotide sequence having SEQ ID NO:434; or a _{VH} nucleotide sequence having SEQ ID NO: 435 and a _{VL} nucleotide sequence having SEQ ID NO:436; or a _{VH} nucleotide sequence having SEQ ID NO: 437 and a _{VL} nucleotide sequence having SEQ ID NO:438; or a _{VH} nucleotide sequence having SEQ ID NO: 439 and a _{VL} nucleotide sequence having SEQ ID NO:440; or a _{VH} nucleotide sequence having SEQ ID NO: 441 and a _{VL} nucleotide sequence having SEQ ID NO:442; or a VH nucleotide sequence having SEQ ID NO: 541 and a VL nucleotide sequence having SEQ ID NO: 542; or a VH nucleotide sequence having SEQ ID NO: 543 and a VL nucleotide sequence having SEQ ID NO: 544; or a VH nucleotide sequence having SEQ ID NO: 545 and a VL nucleotide sequence having SEQ ID NO: 546; or a VH nucleotide sequence having SEQ ID NO: 547 and a VL nucleotide sequence having SEQ ID NO: 548; or a VH nucleotide sequence having SEQ ID NO: 549 and a VL nucleotide sequence having SEQ ID NO: 550; or a VH nucleotide sequence having SEQ ID NO: 551 and a VL nucleotide sequence having SEQ ID NO: 552; or a VH nucleotide sequence having SEQ ID NO: 553 and a VL nucleotide sequence having SEQ ID NO: 554; or a VH nucleotide sequence having SEQ ID NO: 555 and a VL nucleotide sequence having SEQ ID NO: 556; or a VH nucleotide sequence having SEQ ID NO: 557 and a VL nucleotide sequence having SEQ ID NO: 558; or a VH nucleotide sequence having SEQ ID NO: 559 and a VL nucleotide sequence having SEQ ID NO: 560; or a VH nucleotide sequence having SEQ ID NO: 561 and a VL nucleotide sequence having SEQ ID NO: 562; or a VH nucleotide sequence having SEQ ID NO: 563 and a VL nucleotide sequence having SEQ ID NO: 564; or a VH nucleotide sequence having SEQ ID NO: 565 and a VL nucleotide sequence having SEQ ID NO: 566; or a VH nucleotide sequence having SEQ ID NO: 567 and a VL nucleotide sequence having SEQ ID NO: 568; or a VH nucleotide sequence having SEQ ID NO: 569 and a VL nucleotide sequence having SEQ ID NO: 570; or a VH nucleotide sequence having SEQ ID NO: 571 and a VL nucleotide sequence having SEQ ID NO: 572; or a VH nucleotide sequence having SEQ ID NO: 573 and a VL nucleotide sequence having SEQ ID NO: 574; or a VH nucleotide sequence having SEQ ID NO: 575 and a VL nucleotide sequence having SEQ ID NO: 576; or a VH nucleotide sequence having SEQ ID NO: 577 and a VL nucleotide sequence having SEQ ID NO: 578; or a VH nucleotide sequence having SEQ ID NO: 579 and a VL nucleotide sequence having SEQ ID NO: 580; or a VH nucleotide sequence having SEQ ID NO: 581 and a VL nucleotide sequence having SEQ ID NO: 582; or a VH nucleotide sequence having SEQ ID NO: 583 and a VL nucleotide sequence having SEQ ID NO: 584; or a VH nucleotide sequence having SEQ ID NO: 585 and a VL nucleotide sequence having SEQ ID NO: 586; or a VH nucleotide sequence having SEQ ID NO: 587 and a VL nucleotide sequence having SEQ ID NO: 588; or a VH nucleotide sequence having SEQ ID NO: 589 and a VL nucleotide sequence having SEQ ID NO: 590; or a VH nucleotide sequence having SEQ ID NO: 591 and a VL nucleotide sequence having SEQ ID NO: 592; or a VH nucleotide sequence having SEQ ID NO: 593 and a VL nucleotide sequence having SEQ ID NO: 594; or a VH nucleotide sequence having SEQ ID NO: 595 and a VL nucleotide sequence having SEQ ID NO: 596; or a VH nucleotide sequence having SEQ ID NO: 597 and a VL nucleotide sequence having SEQ ID NO: 598; or a VH nucleotide sequence having SEQ ID NO: 599 and a VL nucleotide sequence having SEQ ID NO: 600.

[0102] Exemplary anti-influenza antibodies antibody include antibodies having a _{VH} amino acid sequence having SEQ ID NO: 469 and a _{VL} amino acid sequence having SEQ ID NO: 470; a _{VH} amino acid having SEQ ID NO: 471 and a V_{L} polypeptide sequence having SEQ ID NO:472; a _{VH} amino acid sequence having SEQ ID NO: 473 and a V_{L} amino acid sequence having SEQ ID NO: 474; a _{VH} amino acid sequence having SEQ ID NO: 475 and a _{VL} amino acid sequence having SEQ ID NO: 476; or a _{VH} nucleotide sequence having SEQ ID NO: 477 and a _{VL} nucleotide sequence having SEQ ID NO:478; a _{VH} amino acid sequence having SEQ ID NO: 479 and a _{VL} amino acid sequence having SEQ ID NO: 480; a _{VH} amino acid sequence having SEQ ID NO: 481 and a _{VL} amino acid sequence having SEQ ID NO: 482; a _{VH} amino acid sequence having SEQ ID NO: 483 and a _{VL} amino acid sequence having SEQ ID NO: 484; a _{VH} amino acid sequence having SEQ ID NO: 485 and a _{VL} amino acid sequence having SEQ ID NO: 486; a _{VH} amino acid sequence having SEQ ID NO: 487 and a _{VL} amino acid sequence having SEQ ID NO: 488; a _{VH} amino acid sequence having SEQ ID NO: 489 and a _{VL} amino acid sequence having SEQ ID NO: 490; a _{VH} amino acid sequence having SEQ ID NO: 491 and a _{VL} amino acid sequence having SEQ ID NO: 492; a _{VH} amino acid sequence having SEQ ID NO: 493 and a _{VL} amino acid sequence having SEQ ID NO: 494; a _{VH} amino acid sequence having SEQ ID NO: 495 and a _{VL} amino acid sequence having SEQ ID NO: 496; a _{VH} amino acid sequence having SEQ ID NO: 497 and a _{VL} amino acid sequence having SEQ ID NO: 498; a _{VH} amino acid sequence having SEQ ID NO: 499 and a _{VL} amino acid sequence having SEQ ID NO: 500; a _{VH} amino acid sequence having SEQ ID NO: 501 and a _{VL} amino acid sequence having SEQ ID NO: 502; a _{VH} amino acid sequence having SEQ ID NO: 503 and a _{VL} amino acid sequence having SEQ ID NO: 504; a _{VH} amino acid sequence having SEQ ID NO: 505 and a _{VL} amino acid sequence having SEQ ID NO: 506; a _{VH} amino acid sequence having SEQ ID NO: 507 and a _{VL} amino acid sequence having SEQ ID NO: 508; a _{VH} amino acid sequence having SEQ ID NO: 509 and a _{VL} amino acid sequence having SEQ ID NO: 510; a _{VH} amino acid sequence having SEQ ID NO: 511 and a _{VL} amino acid sequence having SEQ ID NO: 512; a _{VH} amino acid sequence having SEQ ID NO: 513 and a _{VL} amino acid sequence having SEQ ID NO: 514; a _{VH} amino acid sequence having SEQ ID NO: 515 and a _{VL} amino acid sequence having SEQ ID NO: 516; a _{VH} amino acid sequence having SEQ ID NO: 517 and a _{VL} amino acid sequence having SEQ ID NO: 518; a _{VH} amino acid sequence having SEQ ID NO: 519 and a _{VL} amino acid sequence having SEQ ID NO: 520; a _{VH} amino acid sequence having SEQ ID NO: 521 and a _{VL} amino acid sequence having SEQ ID NO: 522; a _{VH} amino acid sequence having SEQ ID NO: 523 and a _{VL} amino acid sequence having SEQ ID NO: 524; a _{VH} amino acid sequence having SEQ ID NO: 525 and a _{VL} amino acid sequence having SEQ ID NO: 526; a _{VH} amino acid sequence having SEQ ID NO: 527 and a _{VL} amino acid sequence having SEQ ID NO: 528; a _{VH} amino acid sequence having SEQ ID NO: 529 and a _{VL} amino acid sequence having SEQ ID NO: 530; a _{VH} amino acid sequence having SEQ ID NO: 531 and a _{VL} amino acid sequence having SEQ ID NO: 532; a _{VH} amino acid sequence having SEQ ID NO: 533 and a _{VL} amino acid sequence having SEQ ID NO: 534; a _{VH} amino acid sequence having SEQ ID NO: 535 and a _{VL} amino acid sequence having SEQ ID NO: 536; a _{VH} amino acid sequence having SEQ ID NO: 537 and a _{VL} amino acid sequence having SEQ ID NO: 538; a _{VH} amino acid sequence having SEQ ID NO: 539 and a _{VL} amino acid sequence having SEQ ID NO: 540 a VH amino acid sequence having SEQ ID NO: 601 and a VL amino acid sequence having SEQ ID NO: 602 a VH amino acid sequence having SEQ ID NO: 603 and a VL amino acid sequence having SEQ ID NO: 604 a VH amino acid sequence having SEQ ID NO: 605 and a VL amino acid sequence having SEQ ID NO: 606 a VH amino acid sequence having SEQ ID NO: 607 and a VL amino acid sequence having SEQ ID NO: 608 a VH amino acid sequence having SEQ ID NO: 609 and a VL amino acid sequence having SEQ ID NO: 610 a VH amino acid sequence having SEQ ID NO: 611 and a VL amino acid sequence having SEQ ID NO: 612 a VH amino acid sequence having SEQ ID NO: 613 and a VL amino acid sequence having SEQ ID NO: 614 a VH amino acid sequence having SEQ ID NO: 615 and a VL amino acid sequence having SEQ ID NO: 616 a VH amino acid sequence having SEQ ID NO: 617 and a VL amino acid sequence having SEQ ID NO: 618 a VH amino acid sequence having SEQ ID NO: 619 and a VL amino acid sequence having SEQ ID NO: 620 a VH amino acid sequence having SEQ ID NO: 621 and a VL amino acid sequence having SEQ ID NO: 622 a VH amino acid sequence having SEQ ID NO: 623 and a VL amino acid sequence having SEQ ID NO: 624 a VH amino acid sequence having SEQ ID NO: 625 and a VL amino acid sequence having SEQ ID NO: 626 a VH amino acid sequence having SEQ ID NO: 627 and a VL amino acid sequence having SEQ ID NO: 628 a VH amino acid sequence having SEQ ID NO: 629 and a VL amino acid sequence having SEQ ID NO: 630 a VH amino acid sequence having SEQ ID NO: 631 and a VL amino acid sequence having SEQ ID NO: 632 a VH amino acid sequence having SEQ ID NO: 633 and a VL amino acid sequence having SEQ ID NO: 634 a VH amino acid sequence having SEQ ID NO: 635 and a VL amino acid sequence having SEQ ID NO: 636 a VH amino acid sequence having SEQ ID NO: 637 and a VL amino acid sequence having SEQ ID NO: 638 a VH amino acid sequence having SEQ ID NO: 639 and a VL amino acid sequence having SEQ ID NO: 640 a VH amino acid sequence having SEQ ID NO: 641 and a VL amino acid sequence having SEQ ID NO: 642 a VH amino acid sequence having SEQ ID NO: 643 and a VL amino acid sequence having SEQ ID NO: 644 a VH amino acid sequence having SEQ ID NO: 645 and a VL amino acid sequence having SEQ ID NO: 646 a VH amino acid sequence having SEQ ID NO: 647 and a VL amino acid sequence having SEQ ID NO: 648 a VH amino acid sequence having SEQ ID NO: 649 and a VL amino acid sequence having SEQ ID NO: 650 a VH amino acid sequence having SEQ ID NO: 651 and a VL amino acid sequence having SEQ ID NO: 652 a VH amino acid sequence having SEQ ID NO: 653 and a VL amino acid sequence having SEQ ID NO: 654 a VH amino acid sequence having SEQ ID NO: 655 and a VL amino acid sequence having SEQ ID NO: 656 a VH amino acid sequence having SEQ ID NO: 657 and a VL amino acid sequence having SEQ ID NO: 658 a VH amino acid sequence having SEQ ID NO: 659 and a VL amino acid sequence having SEQ ID NO: 660.

[0103] In other embodiments the anti-influenza antibodies antibody has a heavy chain with three CDRs including the amino acid sequences SEQ ID NO: 1, 37, 73 respectively and a light chain with three CDRs including the amino acid sequences 109, 145, 181 respectively; or a heavy chain with three CDRs comprising the amino acid sequences 2, 38, 74 respectively and a light chain with three CDRs comprising the amino acid sequences 110, 146, 182, respectively; or a heavy chain with three CDRs comprising the amino acid sequences 3, 39, 75 respectively and a light chain with three CDRs comprising the amino acid sequences 111, 147, 183, respectively; or a heavy chain with three CDRs comprising the amino acid sequences 4, 40, 76 respectively and a light chain with three CDRs comprising the amino acid sequences 112, 148, 184, respectively; or a heavy chain with three CDRs comprising the amino acid sequences 5, 41, 77 respectively and a light chain with three CDRs comprising the amino acid sequences 113, 149, 185, respectively; or a heavy chain with three CDRs comprising the amino acid sequences 6, 42, 78 respectively and a light chain with three CDRs comprising the amino acid sequences 114, 150, 186, respectively; or a heavy chain with three CDRs comprising the amino acid sequences 7, 43, 79 respectively and a light chain with three CDRs comprising the amino acid sequences 115, 151, 187, respectively; or a heavy chain with three CDRs comprising the amino acid sequences 8, 44, 80 respectively and a light chain with three CDRs comprising the amino acid sequences 116, 152, 188, respectively; or a heavy chain with three CDRs comprising the amino acid sequences 9, 45, 81 respectively and a light chain with three CDRs comprising the amino acid sequences 117, 153, 189, respectively; or a heavy chain with three CDRs comprising the amino acid sequences 10, 46, 82 respectively and a light chain with three CDRs comprising the amino acid sequences 118, 154, 190, respectively; or a heavy chain with three CDRs comprising the amino acid sequences 11, 47, 83 respectively and a light chain with three CDRs comprising the amino acid sequences 119, 155, 191, respectively; or a heavy chain with three CDRs comprising the amino acid sequences 12, 48, 84 respectively and a light chain with three CDRs comprising the amino acid sequences 120, 156, 192, respectively; or a heavy chain with three CDRs comprising the amino acid sequences 13, 49, 85 respectively and a light chain with three CDRs comprising the amino acid sequences 121, 157, 193, respectively; or a heavy chain with three CDRs comprising the amino acid sequences 14, 50, 86 respectively and a light chain with three CDRs comprising the amino acid sequences 122, 158, 194, respectively; or a heavy chain with three CDRs comprising the amino acid sequences 15, 51, 87 respectively and a light chain with three CDRs comprising the amino acid sequences 123, 159, 195, respectively; or a heavy chain with three CDRs comprising the amino acid sequences 16, 52, 88 respectively and a light chain with three CDRs comprising the amino acid sequences 124, 160, 196, respectively; or a heavy chain with three CDRs comprising the amino acid sequences 17, 53, 89 respectively and a light chain with three CDRs comprising the amino acid sequences 125, 161, 197, respectively; or a heavy chain with three CDRs comprising the amino acid sequences 18, 54, 90 respectively and a light chain with three CDRs comprising the amino acid sequences 126, 162, 198, respectively; or a heavy chain with three CDRs comprising the amino acid sequences 19, 55, 91 respectively and a light chain with three CDRs comprising the amino acid sequences 127, 163, 199, respectively; or a heavy chain with three CDRs comprising the amino acid sequences 20, 56, 92 respectively and a light chain with three CDRs comprising the amino acid sequences 128, 164, 200, respectively; or a heavy chain with three CDRs comprising the amino acid sequences 21, 57, 93 respectively and a light chain with three CDRs comprising the amino acid sequences 129, 165, 201, respectively; or a heavy chain with three CDRs comprising the amino acid sequences 22, 58, 94 respectively and a light chain with three CDRs comprising the amino acid sequences 130, 166, 202, respectively; or a heavy chain with three CDRs comprising the amino acid sequences 23, 59, 95 respectively and a light chain with three CDRs comprising the amino acid sequences 131, 167, 203, respectively; or a heavy chain with three CDRs comprising the amino acid sequences 24, 60, 96 respectively and a light chain with three CDRs comprising the amino acid sequences 132, 168, 204, respectively; or a heavy chain with three CDRs comprising the amino acid sequences 25, 61, 95 respectively and a light chain with three CDRs comprising the amino acid sequences 133, 169, 205, respectively; or a heavy chain with three CDRs comprising the amino acid sequences 26, 62, 96 respectively and a light chain with three CDRs comprising the amino acid sequences 134, 170, 206, respectively; or a heavy chain with three CDRs comprising the amino acid sequences 27, 63, 97 respectively and a light chain with three CDRs comprising the amino acid sequences 135, 171, 207, respectively; or a heavy chain with three CDRs comprising the amino acid sequences 28, 64, 98 respectively and a light chain with three CDRs comprising the amino acid sequences 136, 172, 208, respectively; or a heavy chain with three CDRs comprising the amino acid sequences 29, 65, 99 respectively and a light chain with three CDRs comprising the amino acid sequences 137, 173, 209, respectively; or a heavy chain with three CDRs comprising the amino acid sequences 30, 66, 100 respectively and a light chain with three CDRs comprising the amino acid sequences 138, 174, 210, respectively; or a heavy chain with three CDRs comprising the amino acid sequences 31, 67, 101 respectively and a light chain with three CDRs comprising the amino acid sequences 139, 175, 211, respectively; or a heavy chain with three CDRs comprising the amino acid sequences 32, 68, 102 respectively and a light chain with three CDRs comprising the amino acid sequences 140, 176, 212, respectively; or a heavy chain with three CDRs comprising the amino acid sequences 33, 69, 103 respectively and a light chain with three CDRs comprising the amino acid sequences 141, 177, 213, respectively; or a heavy chain with three CDRs comprising the amino acid sequences 34, 70, 104 respectively and a light chain with three CDRs comprising the amino acid sequences 142, 178, 214, respectively; or a heavy chain with three CDRs comprising the amino acid sequences 35, 71, 105 respectively and a light chain with three CDRs comprising the amino acid sequences 143, 179, 215, respectively; or a heavy chain with three CDRs comprising the amino acid sequences 36, 72, 106 respectively and a light chain with three CDRs comprising the amino acid sequences 144, 180, 216, respectively; or a heavy chain with three CDRs comprising the amino acid sequences 217, 247, 277 respectively and a light chain with three CDRs comprising the amino acid sequences 307, 337, 367, respectively; or a heavy chain with three CDRs comprising the amino acid sequences 218, 248, 278 respectively and a light chain with three CDRs comprising the amino acid sequences 308, 338, 368, respectively; or a heavy chain with three CDRs comprising the amino acid sequences 219, 249, 279 respectively and a light chain with three CDRs comprising the amino acid sequences 309, 339, 369, respectively; or a heavy chain with three CDRs comprising the amino acid sequences 220, 250, 280 respectively and a light chain with three CDRs comprising the amino acid sequences 310, 340, 370, respectively; or a heavy chain with three CDRs comprising the amino acid sequences 221, 251, 281 respectively and a light chain with three CDRs comprising the amino acid sequences 311, 341, 371, respectively; or a heavy chain with three CDRs comprising the amino acid sequences 222, 252, 282 respectively and a light chain with three CDRs comprising the amino acid sequences 312, 342, 372, respectively; or a heavy chain with three CDRs comprising the amino acid sequences 223, 253, 283 respectively and a light chain with three CDRs comprising the amino acid sequences 313, 343, 373, respectively; or a heavy chain with three CDRs comprising the amino acid sequences 224, 254, 284 respectively and a light chain with three CDRs comprising the amino acid sequences 314, 344, 374, respectively; or a heavy chain with three CDRs comprising the amino acid sequences 225, 255, 285 respectively and a light chain with three CDRs comprising the amino acid sequences 315, 345, 375, respectively; or a heavy chain with three CDRs comprising the amino acid sequences 226, 256, 286 respectively and a light chain with three CDRs comprising the amino acid sequences 316, 346, 376, respectively; or a heavy chain with three CDRs comprising the amino acid sequences 227, 257, 287 respectively and a light chain with three CDRs comprising the amino acid sequences 317, 347, 377, respectively; or a heavy chain with three CDRs comprising the amino acid sequences 228, 258, 288 respectively and a light chain with three CDRs comprising the amino acid sequences 318, 348, 378, respectively; or a heavy chain with three CDRs comprising the amino acid sequences 229, 259, 289 respectively and a light chain with three CDRs comprising the amino acid sequences 319, 349, 379, respectively; or a heavy chain with three CDRs comprising the amino acid sequences 230, 260, 290 respectively and a light chain with three CDRs comprising the amino acid sequences 320, 350, 380, respectively; or a heavy chain with three CDRs comprising the amino acid sequences 231, 261, 291 respectively and a light chain with three CDRs comprising the amino acid sequences 321, 351, 381, respectively; or a heavy chain with three CDRs comprising the amino acid sequences 232, 262, 292 respectively and a light chain with three CDRs comprising the amino acid sequences 322, 352, 382, respectively; or a heavy chain with three CDRs comprising the amino acid sequences 233, 263, 293 respectively and a light chain with three CDRs comprising the amino acid sequences 323, 353, 383, respectively; or a heavy chain with three CDRs comprising the amino acid sequences 234, 273, 294 respectively and a light chain with three CDRs comprising the amino acid sequences 324, 354, 384, respectively; or a heavy chain with three CDRs comprising the amino acid sequences 235, 274, 295 respectively and a light chain with three CDRs comprising the amino acid sequences 325, 355, 385, respectively; or a heavy chain with three CDRs comprising the amino acid sequences 236, 275, 296 respectively and a light chain with three CDRs comprising the amino acid sequences 326, 356, 386, respectively; or a heavy chain with three CDRs comprising the amino acid sequences 237, 276, 297 respectively and a light chain with three CDRs comprising the amino acid sequences 327, 357, 387, respectively; or a heavy chain with three CDRs comprising the amino acid sequences 237, 277, 298 respectively and a light chain with three CDRs comprising the amino acid sequences 328, 358, 388, respectively; or a heavy chain with three CDRs comprising the amino acid sequences 238, 278, 299 respectively and a light chain with three CDRs comprising the amino acid sequences 329, 359, 389, respectively; or a heavy chain with three CDRs comprising the amino acid sequences 239, 279, 300 respectively and a light chain with three CDRs comprising the amino acid sequences 330, 360, 390, respectively; or a heavy chain with three CDRs comprising the amino acid sequences 240, 280, 301 respectively and a light chain with three CDRs comprising the amino acid sequences 331, 361, 391, respectively; or a heavy chain with three CDRs comprising the amino acid sequences 241, 281, 302 respectively and a light chain with three CDRs comprising the amino acid sequences 332, 362, 392, respectively; or a heavy chain with three CDRs comprising the amino acid sequences 242, 282, 303 respectively and a light chain with three CDRs comprising the amino acid sequences 333, 363, 393, respectively; or a heavy chain with three CDRs comprising the amino acid sequences 243, 283, 304 respectively and a light chain with three CDRs comprising the amino acid sequences 334, 364, 394, respectively; or a heavy chain with three CDRs comprising the amino acid sequences 244, 284, 305 respectively and a light chain with three CDRs comprising the amino acid sequences 335, 365, 395, respectively; or a heavy chain with three CDRs comprising the amino acid sequences 245, 285, 306 respectively and a light chain with three CDRs comprising the amino acid sequences 336, 366, 396, respectively.

[0104] Other anti-influenza antibodies include those having the amino acid or nucleic acid sequences shown in the below Table 1.

TABLE 1

A. Antibody 3I14Variable Region nucleic
acid sequences
V_{H} chain of 3I14
(SEQ ID NO: 1665)
CAGGTGCAGCTGTTGGAGTCTGGGGGAGGCGTGGTCCAGCCTGGGA
GGTCCCTGAGACTCTCCTGTGCAGCCTCTGGATTCACCTTCAGTAA
CTATGGCATGCACTGGGTCCGCCAGGCTCCAGGCAAGGGGCTGGAG
TGGGTGGCAATTATATCATTTGATGGAAGTAAAAAATATTATGCAA
ACTCCGTGAAGGGCCGATCCACCATCTCCAGAGACAATTCCAAGAA
CACGCTGTCTCTGCAAATGAACAGCCTGGGACCTGAGGACACGGCT
CTATATTACTGTGCGAAACTGCCCTCCCCGTATTACTTTGATAGTC
GGTTCGTGTGGGTCGCCGCCAGCGCATTTCACTTCTGGGGCCAGGG
AATCCTGGTCACCGTCTCTTCA
V_{L} chain of 3I14
(SEQ ID NO: 1667)
AATTTTATGCTGACTCAGCCACCCTCAGCGTCTGGGACCCCCGGGC
AGAGGGTCACCATCTCTTGCTCTGGAAGCAGCTCCAACATCGGAGG
TAATACTGTACACTGGTTCCAGCAGCTCCCAGGAACGGCCCCCAAA
CTCCTCATCTATACTAATAGTCTGCGGCCCTCAGGGGTCCCTGACC
GATTCTCTGGCTCCAAGTCTGGCACCTCAGCCTCCCTGGCCATCAG
TGGGCTCCAGTCTGAGGATGAGGCTGATTATTACTGTGCAGCATGG
GATGACAGCCTAAATGGTCAGGTGTTCGGCGGAGGGACCAAGCTGA
CCGTCCTA
B. Antibody3I14Variable Region amino acid
sequences
V_{H} chain of 3I14
(SEQ ID NO: 1666)
QVQLLESGGGVVQPGRSLRLSCAASGFTFSNYGMHWVRQAPGKGLE
WVAIISFDGSKKYYANSVKGRSTISRDNSKNTLSLQMNSLGPEDTA
LYYCAKLPSPYYFDSRFVWVAASAFHFWGQGILVTVSS
V_{L} chain of 3I14
(SEQ ID NO: 1668)
NFMLTQPPSASGTPGQRVTISCSGSSSNIGGNTVHWFQQLPGTAPK
LLIYTNSLRPSGVPDRFSGSKSGTSASLAISGLQSEDEADYYCAAW
DDSLNGQVFGGGTKLTVL
C. Antibody 3I14V_{L}D94N Variable Region nucleic
acid sequence
V_{L} chain of 3I14V_{L}D94N
(SEQ ID NO: 1669)
AATTTTATGCTGACTCAGCCACCCTCAGCGTCTGGGACCCCCGGGC
AGAGGGTCACCATCTCTTGCTCTGGAAGCAGCTCCAACATCGGAGG
TAATACTGTACACTGGTTCCAGCAGCTCCCAGGAACGGCCCCCAAA
CTCCTCATCTATACTAATAGTCTGCGGCCCTCAGGGGTCCCTGACC
GATTCTCTGGCTCCAAGTCTGGCACCTCAGCCTCCCTGGCCATCAG
TGGGCTCCAGTCTGAGGATGAGGCTGATTATTACTGTGCAGCATGG
GATAACAGCCTAAATGGTCAGGTGTTCGGCGGAGGGACCAAGCTGA
CCGTCCTA
C. Antibody 3I14V_{L}D94N Variable Region amino
acid sequence
V_{L} chain of 3I14V_{L}D94N
(SEQ ID NO: 1670)
NFMLTQPPSASGTPGQRVTISCSGSSSNIGGNTVHWFQQLPGTAPK
LLIYTNSLRPSGVPDRFSGSKSGTSASLAISGLQSEDEADYYCAAW
DNSLNGQVFGGGTKLTVL

[0105] The amino acid sequences of the heavy and light chain complementary determining regions of the 3I14 and 3I14V_{L}D94N neutralizing influenza antibodies are shown in the below Table 2

TABLE 2

| | | |
|---|---|---|
| HCDR1 | GFTFSNYG | (SEQ ID NO: 1671) |
| HCDR2 | ISFDGSKK | (SEQ ID NO: 1672) |
| HCDR3 | CAKLPSPYYFDSR | (SEQ ID NO: 1673) |
| | FVWVAASAFHFW | |
| LCDR1 | SSNIGGNT | (SEQ ID NO: 1674) |
| LCDR2 | TNS | (SEQ ID NO: 1675) |
| LCDR3 | CAAWDDSLNGQVF | (SEQ ID NO: 1676) |
| 3I14V_{L}D94N | CAAWDNSLNGQVF | (SEQ ID NO: 1677) |
| LCDR3 | | |

[0106] CC-Chemokine Receptor 4 CCR4 (94)

[0107] Exemplary anti-CCR4 antibodies include antibodies having a VH nucleotide sequence having SEQ ID NO: 1678 and a VL nucleotide sequence having SEQ ID NO: 1679; or a VH nucleotide sequence having SEQ ID NO: 1680 and a VL nucleotide sequence having SEQ ID NO: 1681; or a VH nucleotide sequence having SEQ ID NO: 1682 and a VL nucleotide sequence having SEQ ID NO: 1683; or a VH nucleotide sequence having SEQ ID NO: 1684 and a VL nucleotide sequence having SEQ ID NO: 1685; or a VH nucleotide sequence having SEQ ID NO: 1686 and a VL nucleotide sequence having SEQ ID NO: 1687; or a VH nucleotide sequence having SEQ ID NO: 1688 and a VL nucleotide sequence having SEQ ID NO: 1689.

[0108] Exemplary anti-CCR4 antibodies include antibodies having a VH amino acid sequence having SEQ ID NO: 1690 and a VL amino acid sequence having SEQ ID NO: 1691; or a VH amino acid sequence having SEQ ID NO: 1692 and a VL amino acid sequence having SEQ ID NO: 1693; or a VH amino acid sequence having SEQ ID NO: 1694 and a VL amino acid sequence having SEQ ID NO: 1695; or a VH amino acid sequence having SEQ ID NO: 1696 and a VL amino acid sequence having SEQ ID NO: 1697; or a VH amino acid sequence having SEQ ID NO: 1698 and a VL amino acid sequence having SEQ ID NO: 1699; or a VH amino acid sequence having SEQ ID NO: 1700 and a VL amino acid sequence having SEQ ID NO: 1701.

[0109] In other embodiments the anti-influenza antibodies have a heavy chain with three CDRs having the amino acid sequences of SEQ ID NO: 1702, 1703, 1704, respectively, and a light chain with three CDRs having the amino acid sequences of SEQ ID NO: 1705, 1706, 1707, respectively; or a heavy chain with three CDRs having the amino acid sequences of SEQ ID NO: 1708, 1709, 1710, respectively, and a light chain with three CDRs having the amino acid sequences of SEQ ID NO: 1711, 1712, 1713, respectively; or a heavy chain with three CDRs having the amino acid sequences of SEQ ID NO: 1714, 1715, 1716, respectively, and a light chain with three CDRs having the amino acid sequences of SEQ ID NO: 1717, 1718, 1719, respectively; or a heavy chain with three CDRs having the amino acid sequences of SEQ ID NO: 1720, 1721, 1722, respectively, and a light chain with three CDRs having the amino acid sequences of SEQ ID NO: 1723, 1724, 1725, respectively; or a heavy chain with three CDRs having the amino acid sequences of SEQ ID NO: 1726, 1727, 1728, respectively, and a light chain with three CDRs having the amino acid sequences of SEQ ID NO: 1729, 1730, 1731, respectively; or a heavy chain with three CDRs having the amino acid sequences of SEQ ID NO: 1732, 1733, 1734, respectively, and a light chain with three CDRs having the amino acid sequences of SEQ ID NO: 1735, 1736, 1737, respectively; or a heavy chain with three CDRs having the amino acid sequences of SEQ ID NO: 1738, 1739, 1740, respectively, and a light chain with three CDRs having the amino acid sequences of SEQ ID NO: 1741, 1742, 1743, respectively.

[0110] Human Immunoglobulin Heavy Chain Variable Region Germline Gene (VH1-69) (133)

[0111] Exemplary anti-human immunoglobulin heavy chain variable region germline gene VH1-69 antibodies include a VH nucleotide sequence having SEQ ID NO: 1744 and a VL nucleotide sequence having SEQ ID NO: 1745; or a VH nucleotide sequence having SEQ ID NO: 1748 and a VL nucleotide sequence having SEQ ID NO: 1749; or a VH nucleotide sequence having SEQ ID NO: 1752 and a VL nucleotide sequence having SEQ ID NO: 1753.

[0112] Exemplary anti-human immunoglobulin heavy chain variable region germline gene VH1-69 antibodies include a VH amino acid sequence having SEQ ID NO: 1746 and a VL amino acid sequence having SEQ ID NO: 1747; or a VH amino acid sequence having SEQ ID NO: 1750 and a VL amino acid sequence having SEQ ID NO: 1751; or a VH amino acid sequence having SEQ ID NO: 1754 and a VL amino acid sequence having SEQ ID NO: 1755.

[0113] In other embodiments the anti-human immunoglobulin heavy chain variable region germline gene VH1-69 antibodies have a heavy chain with three CDRs having the amino acid sequences of SEQ ID NO: 1756, 1757, 1758, respectively, and a light chain with three CDRs having the amino acid sequences of SEQ ID NO: 1759, 1760, 1761, respectively.

[0114] Zika Virus Antibodies (140)

[0115] Exemplary antibodies that target and neutralize zika virus include antibodies having a VH nucleotide sequence having SEQ ID NO: 1762 and a VL nucleotide sequence having SEQ ID NO: 1763.

[0116] Exemplary antibodies that target and neutralize zika virus include antibodies having a VH amino acid sequence having SEQ ID NO: 1764 and a VL amino acid sequence having SEQ ID NO: 1765.

[0117] In other embodiments, the antibodies that target and neutralize zika virus have a heavy chain with three CDRs having the amino acid sequences of SEQ ID NO: 1766, 1767, 1768, respectively, and a light chain with three CDRs having the amino acid sequences of SEQ ID NO: 1769, 1770, 1771, respectively.

[0118] Glucocorticoid-Induced Tumor Necrosis Factor Receptor (GITR) (141)

[0119] Exemplary anti-glucocorticoid-induced tumor necrosis factor receptor (GITR) antibodies include a VH nucleotide sequence having SEQ ID NO: 1772 and a VL nucleotide sequence having SEQ ID NO: 1773; or a VH nucleotide sequence having SEQ ID NO: 1774 and a VL nucleotide sequence having SEQ ID NO: 1775; or a VH nucleotide sequence having SEQ ID NO: 1776 and a VL nucleotide sequence having SEQ ID NO: 1777; or a VH nucleotide sequence having SEQ ID NO: 1778 and a VL nucleotide sequence having SEQ ID NO: 1779; or a VH nucleotide sequence having SEQ ID NO: 1780 and a VL nucleotide sequence having SEQ ID NO: 1781; or a VH nucleotide sequence having SEQ ID NO: 1782 and a VL nucleotide sequence having SEQ ID NO: 1783; or a VH nucleotide sequence having SEQ ID NO: 1784 and a VL nucleotide sequence having SEQ ID NO: 1785; or a VH nucleotide sequence having SEQ ID NO: 1786 and a VL nucleotide sequence having SEQ ID NO: 1787; or a VH nucleotide sequence having SEQ ID NO: 1788 and a VL nucleotide sequence having SEQ ID NO: 1789; or a VH nucleotide sequence having SEQ ID NO: 1790 and a VL nucleotide sequence having SEQ ID NO: 1791; or a VH nucleotide sequence having SEQ ID NO: 1792 and a VL nucleotide sequence having SEQ ID NO: 1793; or a VH nucleotide sequence having SEQ ID NO: 1794 and a VL nucleotide sequence having SEQ ID NO: 1795; or a VH nucleotide sequence having SEQ ID NO: 1796 and a VL nucleotide sequence having SEQ ID NO: 1797.

[0120] Exemplary anti-glucocorticoid-induced tumor necrosis factor receptor (GITR) antibodies include a VH amino acid sequence having SEQ ID NO: 1798 and a VL amino acid sequence having SEQ ID NO: 1799; or a VH amino acid sequence having SEQ ID NO: 1800 and a VL amino acid sequence having SEQ ID NO: 1801; or a VH amino acid sequence having SEQ ID NO: 1802 and a VL amino acid sequence having SEQ ID NO: 1803; or a VH amino acid sequence having SEQ ID NO: 1804 and a VL amino acid sequence having SEQ ID NO: 1805; or a VH amino acid sequence having SEQ ID NO: 1806 and a VL amino acid sequence having SEQ ID NO: 1807; or a VH amino acid sequence having SEQ ID NO: 1808 and a VL amino acid sequence having SEQ ID NO: 1809; or a VH amino acid sequence having SEQ ID NO: 1810 and a VL amino acid sequence having SEQ ID NO: 1811; or a VH amino acid sequence having SEQ ID NO: 1812 and a VL amino acid sequence having SEQ ID NO: 1813; or a VH amino acid sequence having SEQ ID NO: 1814 and a VL amino acid sequence having SEQ ID NO: 1815; or a VH amino acid sequence having SEQ ID NO: 1816 and a VL amino acid sequence having SEQ ID NO: 1817; or a VH amino acid sequence having SEQ ID NO: 1818 and a VL amino acid sequence having SEQ ID NO: 1819; or a VH amino acid sequence having SEQ ID NO: 1820 and a VL amino acid sequence having SEQ ID NO: 1821; or a VH amino acid sequence having SEQ ID NO: 1822 and a VL amino acid sequence having SEQ ID NO: 1823.

[0121] In other embodiments, anti-glucocorticoid-induced tumor necrosis factor receptor (GITR) antibodies have a heavy chain with three CDRs having the amino acid sequences of SEQ ID NO: 1824, 1825, 1826, respectively, and a light chain with three CDRs having the amino acid sequences of SEQ ID NO: 1827, 1828, 1829, respectively; or a heavy chain with three CDRs having the amino acid sequences of SEQ ID NO: 1830, 1831, 1832, respectively, and a light chain with three CDRs having the amino acid sequences of SEQ ID NO: 1833, 1834, 1835, respectively; or a heavy chain with three CDRs having the amino acid sequences of SEQ ID NO: 1836, 1837, 1838, respectively, and a light chain with three CDRs having the amino acid sequences of SEQ ID NO: 1839, 1840, 1841, respectively; or a heavy chain with three CDRs having the amino acid sequences of SEQ ID NO: 1842, 1843, 1844, respectively, and a light chain with three CDRs having the amino acid sequences of SEQ ID NO: 1845, 1846, 1847, respectively; or a heavy chain with three CDRs having the amino acid sequences of SEQ ID NO: 1848, 1849, 1850, respectively, and a light chain with three CDRs having the amino acid sequences of SEQ ID NO: 1851, 1852, 1853, respectively; or a heavy chain with three CDRs having the amino acid sequences of SEQ ID NO: 1854, 1855, 1856, respectively, and a light chain with three CDRs having the amino acid sequences of SEQ ID NO: 1857, 1858, 1859, respectively; or a heavy chain with three CDRs having the amino acid sequences of SEQ ID NO: 1860, 1861, 1862, respectively, and a light chain with three CDRs having the amino acid sequences of SEQ ID NO: 1863, 1864, 1865, respectively; or a heavy chain with three CDRs having the amino acid sequences of SEQ ID NO: 1866, 1867, 1868, respectively, and a light chain with three CDRs having the amino acid sequences of SEQ ID NO: 1869, 1870, 1871, respectively; or a heavy chain with three CDRs having the amino acid sequences of SEQ ID NO: 1872, 1873, 1874, respectively, and a light chain with three CDRs having the amino acid sequences of SEQ ID NO: 1875, 1876, 1877, respectively; or a heavy chain with three CDRs having the amino acid sequences of SEQ ID NO: 1878, 1879, 1880, respectively, and a light chain with three CDRs having the amino acid sequences of SEQ ID NO: 1881, 1882, 1883, respectively; or a heavy chain with three CDRs having the amino acid sequences of SEQ ID NO: 1884, 1885, 1886, respectively, and a light chain with three CDRs having the amino acid sequences of SEQ ID NO: 1887, 1888, 1889, respectively; or a heavy chain with three CDRs having the amino acid sequences of SEQ ID NO: 1890, 1891, 1892, respectively, and a light chain with three CDRs having the amino acid sequences of SEQ ID NO: 1893, 1894, 1895, respectively; or a heavy chain with three CDRs having the amino acid sequences of SEQ ID NO: 1896, 1897, 1898, respectively, and a light chain with three CDRs having the amino acid sequences of SEQ ID NO: 1899, 1900, 1901.

[0122] The tetravalent antibody is a dimer of a bispecific scFv fragment having a first binding site for a first antigen, a second binding site for a second antigen. The scFv is preferably a tandem scFv. The variable domains of the two binding sites are joined together via a linker domain. In preferred embodiments the linker domain includes an immunoglobulin hinge region amino acid sequence. The hinge region is an IgG1, an IgG2, an IgG3, or an IgG4 hinge region. Exemplary hinge region amino acids sequences include EPKSCDKTHTCPPCP (SEQ ID NO:1902); ERKCCVECPPCP (SEQ ID NO:1903); and ESKYGPPCPSCP (SEQ ID NO:1904).

[0123] In some embodiments the linker domain further includes at least a portion of an immunoglobulin Fc domain. The at least a portion of an immunoglobulin Fc domain is an IgG1, an IgG2, an IgG3, or an IgG4 Fc domain. The at least a portion of an immunoglobulin Fc domain is linked to the C-terminus of the hinge region. By at least a portion of an immunoglobulin Fc domain is meant for example, an immunoglobulin CH2 domain amino acid sequence, CH3 domain amino acid sequence, CH4 domain amino acid sequence or any combination thereof.

[0124] Inclusion of at least a portion of an immunoglobulin Fc domain (e.g. CH2 domain) provides a third functional binding site (i.e. Fc effector function) resulting in a trifunctional bispecific antibody. Accordingly, it can be desirable to modify the at least a portion of with respect to effector function, so as to enhance, e.g., the effectiveness of the tBsAb. For example, amino acids substitution, insertion or deletion can be introduced into the at least a portion of the immunoglobulin Fc domain to generate tBsAbs having improved internalization capability and/or increased complement mediated cell killing and antibody dependent cellular cytotoxicity (ADCC). Alternatively, the at least a portion of the immunoglobulin Fc domain is glycosylated as to improve the stability and solubility of the tBsAbs. For example, the at least a portion of the immunoglobulin Fc domain is glycosylated at the amino acid corresponding to asparagine at amino acid position 297. While glycosylation is important for stability defucosylation of the CH2 carbohydrate can also increase the binding affinity to FcγRs and lead to further enhancement of ADCC.

[0125] In certain embodiments, the tBsAbs of the invention may comprise an Fc variant comprising an amino acid substitution which alters the antigen-independent effector functions of the antibody, in particular the circulating half-life of the antibody. Such antibodies exhibit either increased or decreased binding to FcRn when compared to antibodies lacking these substitutions, therefore, have an increased or decreased half-life in serum, respectively. Fc variants with improved affinity for FcRn are anticipated to have longer serum half-lives, and such molecules have useful applications in methods of treating mammals where long half-life of the administered antibody is desired, e.g., to treat a chronic disease or disorder. In contrast, Fc variants with decreased FcRn binding affinity are expected to have shorter half-lives, and such molecules are also useful, for example, for administration to a mammal where a shortened circulation time may be advantageous, e.g. for in vivo diagnostic imaging or in situations where the starting antibody has toxic side effects when present in the circulation for prolonged periods. In one embodiment, an Fc domain having one or more amino acid substitutions within the “FcRn binding loop” of an Fc domain. The FcRn binding loop is comprised of amino acid residues 280-299 (according to EU numbering). Exemplary amino acid substitutions which altered FcRn binding activity are disclosed in International PCT Publication No. WO05/047327 which is incorporated by reference herein. In certain exemplary embodiments, the antibodies, or fragments thereof, of the invention comprise an Fc domain having one or more of the following substitutions: V284E, H285E, N286D, K290E and S304D (EU numbering). [000126] Preferably the at least a portion of the Fc domain is a CH2 domain amino acid sequence. An exemplary CH2 domain amino acid sequence includes APELLGGPDVFLF (SEQ ID NO: 1905).

[0126] In other aspects the immunoglobulin hinge region amino acid sequence or the immunoglobulin hinge region/Fc domain amino acid sequence is flanked by a flexible linker amino acid sequence. Flexible linker amino acid sequences include for example is (GGGS)_{X=1-6} (SEQ ID NO: 1906), (GGGGS)_{X=1-6} (SEQ ID NO: 1907), or GSAGSAAGSGEF (SEQ ID NO: 1908).

[0127] Increasing the linker by adding multiple repeats (e.g., four or more) will predominantly result in a monomeric scFv, thus it can increase the accessibility to an epitope. Length and composition of the linkers can be chosen to optimize the stability and functional activity and takes into account the topography of the epitope on the target protein.

[0128] Also included in the invention is a nucleic acid construct including nucleic acids molecules encoding: a light chain and a heavy chain variable region of an antibody specifically binding to a first antigen; a light chain and heavy chain variable region of an antibody specifically binding to a second antigen; and a linker domain.

[0129] In yet a further aspect the invention provides a genetically engineered cell which expresses and bears on the cell surface membrane tBsAbs of the invention. The cell is a T-cell, a B-cell, a follicular T-Cell or an NK cell. The T cell is CD4+ or CD8+. The cell is a mixed population of CD4+ and CD8 cells+. The cell is further engineered to express and secrete the tBsAb.

[0130] Vectors including the nucleic acid constructs according to the invention and host cell, e.g., a mammalian cell, expressing the vectors of the invention.

[0131] Chimeric Antigen Receptors

[0132] The tBsAb of the invention can be used to produce a chimeric antigen receptor (CAR). The CAR generally comprises at least one transmembrane polypeptide comprising at least one extracellular ligand-binding domain comprising the tBsAb of the invention and; one transmembrane polypeptide comprising at least one intracellular signaling domain.

[0133] In a preferred embodiment said transmembrane domain further comprises a stalk region between said extracellular ligand-binding domain and said transmembrane domain. The term “stalk region” used herein generally means any oligo- or polypeptide that functions to link the transmembrane domain to the extracellular ligand-binding domain. In particular, stalk region are used to provide more flexibility and accessibility for the extracellular ligand-binding domain. A stalk region may comprise up to 300 amino acids, preferably 10 to 100 amino acids and most preferably 25 to 50 amino acids. Stalk region may be derived from all or part of naturally occurring molecules, such as from all or part of the extracellular region of CD8, CD4 or CD28, or from all or part of an antibody constant region. Alternatively the stalk region may be a synthetic sequence that corresponds to a naturally occurring stalk sequence, or may be an entirely synthetic stalk sequence. In a preferred embodiment said stalk region is a part of human CD8 alpha chain

[0134] The signal transducing domain or intracellular signaling domain of the CAR of the invention is responsible for intracellular signaling following the binding of extracellular ligand binding domain to the target resulting in the activation of the immune cell and immune response. In other words, the signal transducing domain is responsible for the activation of at least one of the normal effector functions of the immune cell in which the CAR is expressed. For example, the effector function of a T cell can be a cytolytic activity or helper activity including the secretion of cytokines. Thus, the term “signal transducing domain” refers to the portion of a protein which transduces the effector signal function signal and directs the cell to perform a specialized function.

[0135] Signal transduction domain comprises two distinct classes of cytoplasmic signaling sequence, those that initiate antigen-dependent primary activation, and those that act in an antigen-independent manner to provide a secondary or co-stimulatory signal. Primary cytoplasmic signaling sequence can comprise signaling motifs which are known as immunoreceptor tyrosine-based activation motifs of ITAMs. ITAMs are well defined signaling motifs found in the intracytoplasmic tail of a variety of receptors that serve as binding sites for syk/zap70 class tyrosine kinases. Examples of ITAM used in the invention can include as non limiting examples those derived from TCR zeta, FcR gamma, FcR beta, FcR epsilon, CD3 gamma, CD3 delta, CD3 epsilon, CD5, CD22, CD79a, CD79b and CD66d. In a preferred embodiment, the signaling transducing domain of the CAR can comprise the CD3 zeta signaling domain, or the intracytoplasmic domain of the Fc epsilon RI beta or gamma chains. In another preferred embodiment, the signaling is provided by CD3 zeta together with co-stimulation provided by CD28 and/or a tumor necrosis factor receptor (TNFr), such as 4-1BB or OX40), for example.

[0136] In particular embodiment the intracellular signaling domain of the CAR of the present invention comprises a co-stimulatory signal molecule. In some embodiments the intracellular signaling domain contains 2, 3, 4 or more co-stimulatory molecules in tandem. A co-stimulatory molecule is a cell surface molecule other than an antigen receptor or their ligands that is required for an efficient immune response.

[0137] “Co-stimulatory ligand” refers to a molecule on an antigen presenting cell that specifically binds a cognate co-stimulatory molecule on a T-cell, thereby providing a signal which, in addition to the primary signal provided by, for instance, binding of a TCR/CD3 complex with an MHC molecule loaded with peptide, mediates a T cell response, including, but not limited to, proliferation activation, differentiation and the like. A co-stimulatory ligand can include but is not limited to CD7, B7-1 (CD80), B7-2 (CD86), PD-L1, PD-L2, 4-1BBL, OX40L, inducible costimulatory ligand (ICOS-L), intercellular adhesion molecule (ICAM, CD30L, CD40, CD70, CD83, HLA-G, MICA, M1CB, HVEM, lymphotoxin beta receptor, 3/TR6, ILT3, ILT4, an agonist or antibody that binds Toll ligand receptor and a ligand that specifically binds with B7-H3. A co-stimulatory ligand also encompasses, inter alia, an antibody that specifically binds with a co-stimulatory molecule present on a T cell, such as but not limited to, CD27, CD28, 4-IBB, OX40, CD30, CD40, PD-1, ICOS, lymphocyte function-associated antigen-1 (LFA-1), CD2, CD7, LTGHT, NKG2C, B7-H3, a ligand that specifically binds with CD83.

[0138] A “co-stimulatory molecule” refers to the cognate binding partner on a T-cell that specifically binds with a co-stimulatory ligand, thereby mediating a co-stimulatory response by the cell, such as, but not limited to proliferation. Co-stimulatory molecules include, but are not limited to an MHC class 1 molecule, BTLA and Toll ligand receptor. Examples of costimulatory molecules include CD27, CD28, CD8, 4-1BB (CD137), OX40, CD30, CD40, PD-1, ICOS, lymphocyte function-associated antigen-1 (LFA-1), CD2, CD7, LIGHT, NKG2C, B7-H3 and a ligand that specifically binds with CD83 and the like. The In another particular embodiment, said signal transducing domain is a TNFR-associated Factor 2 (TRAF2) binding motifs, intracytoplasmic tail of costimulatory TNFR member family. Cytoplasmic tail of costimulatory TNFR family member contains TRAF2 binding motifs consisting of the major conserved motif (P/S/A)X(Q/E)E) or the minor motif (PXQXXD), wherein X is any amino acid. TRAF proteins are recruited to the intracellular tails of many TNFRs in response to receptor trimerization.

[0139] The distinguishing features of appropriate transmembrane polypeptides comprise the ability to be expressed at the surface of an immune cell, in particular lymphocyte cells or Natural killer (NK) cells, and to interact together for directing cellular response of immune cell against a predefined target cell. The different transmembrane polypeptides of the CAR of the present invention comprising an extracellular ligand-biding domain and/or a signal transducing domain interact together to take part in signal transduction following the binding with a target ligand and induce an immune response. The transmembrane domain can be derived either from a natural or from a synthetic source. The transmembrane domain can be derived from any membrane-bound or transmembrane protein although certain transmembrane domains that that best accommodate the chimeras are preferred, e.g., those that promote self-aggregation or promote an increase in CART cell basal activation in the absence of target binding, which could lead to premature exhaustion.

[0140] The term “a part of” used herein refers to any subset of the molecule, that is a shorter peptide. Alternatively, amino acid sequence functional variants of the polypeptide can be prepared by mutations in the DNA which encodes the polypeptide. Such variants or functional variants include, for example, deletions from, or insertions or substitutions of, residues within the amino acid sequence. Any combination of deletion, insertion, and substitution may also be made to arrive at the final construct, provided that the final construct possesses the desired activity, especially to exhibit a specific anti-target cellular immune activity. The functionality of the CAR of the invention within a host cell is detectable in an assay suitable for demonstrating the signaling potential of said CAR upon binding of a particular target. Such assays are available to the skilled person in the art. For example, this assay allows the detection of a signaling pathway, triggered upon binding of the target, such as an assay involving measurement of the increase of calcium ion release, intracellular tyrosine phosphorylation, inositol phosphate turnover, or interleukin (IL) 2, interferon .gamma., GM-CSF, IL-3, IL-4 production thus effected.

[0141] Methods of Use

[0142] The tBsAbs, the cells expressing the tBsAbs or the CARs according to the invention can be used for treating cancer, viral infections or autoimmune disorders in a patient in need thereof. In another embodiment, tBsAbs, the cells expressing the tBsAbs or the CARs according to the invention can be used in the manufacture of a medicament for treatment of a cancer, viral infections of autoimmune disorders, in a patient in need thereof.

[0143] Said treatment can be ameliorating, curative or prophylactic. It may be either part of an autologous immunotherapy or part of an allogenic immunotherapy treatment. By autologous, it is meant that cells, cell line or population of cells used for producing the tBsAbs or the cells expressing the tBsAbs are originating from the patient or from a Human Leucocyte Antigen (HLA) compatible donor. By allogeneic is meant that the cells or population of cells used for producing the tBsAbs or the cells expressing the tBsAbs are not originating from the patient but from a donor.

[0144] Treatment can be used to treat patients diagnosed with cancer, viral infection, autoimmune disorders or Graft versus Host Disease (GvHD). Cancers that may be treated include tumors that are not vascularized, or not yet substantially vascularized, as well as vascularized tumors. The cancers may comprise nonsolid tumors (such as hematological tumors, for example, leukemias and lymphomas) or may comprise solid tumors. Types of cancers to be treated with the CARs of the invention include, but are not limited to, carcinoma, blastoma, and sarcoma, and certain leukemia or lymphoid malignancies, benign and malignant tumors, and malignancies e.g., sarcomas, carcinomas, and melanomas. Adult tumors/cancers and pediatric tumors/cancers are also included.

[0145] It can be a treatment in combination with one or more therapies against cancer selected from the group of antibodies therapy, chemotherapy, cytokines therapy, dendritic cell therapy, gene therapy, hormone therapy, laser light therapy and radiation therapy.

[0146] In a further embodiment, the compositions of the present invention are administered to a patient in conjunction with (e.g., before, simultaneously or following) bone marrow transplantation, T cell ablative therapy using either chemotherapy agents such as, fludarabine, external-beam radiation therapy (XRT), cyclophosphamide, or antibodies such as OKT3 or CAM PATH.

[0147] Definitions

[0148] It is to be noted that the term “a” or “an” entity refers to one or more of that entity: for example, “a bispecific antibody,” is understood to represent one or more bispecific antibodies. As such, the terms “a” (or “an”), “one or more,” and “at least one” can be used interchangeably herein.

[0149] As used herein, the term “polypeptide” is intended to encompass a singular “polypeptide” as well as plural “polypeptides,” and refers to a molecule composed of monomers (amino acids) linearly linked by amide bonds (also known as peptide bonds). The term “polypeptide” refers to any chain or chains of two or more amino acids, and does not refer to a specific length of the product. Thus, peptides, dipeptides, tripeptides, oligopeptides, “protein,” “amino acid chain,” or any other term used to refer to a chain or chains of two or more amino acids, are included within the definition of “polypeptide,” and the term “polypeptide” may be used instead of, or interchangeably with any of these terms. The tern “polypeptide” is also intended to refer to the products of post-expression modifications of the polypeptide, including without limitation glycosylation, acetylation, phosphorylation, amidation, derivatization by known protecting/blocking groups, proteolytic cleavage, or modification by non-naturally occurring amino acids. A polypeptide may be derived from a natural biological source or produced by recombinant technology, but is not necessarily translated from a designated nucleic acid sequence. It may be generated in any manner, including by chemical synthesis.

[0150] The term “isolated” as used herein with respect to cells, nucleic acids, such as DNA or RNA, refers to molecules separated from other DNAs or RNAs, respectively, that are present in the natural source of the macromolecule. The term “isolated” as used herein also refers to a nucleic acid or peptide that is substantially free of cellular material, viral material, or culture medium when produced by recombinant DNA techniques, or chemical precursors or other chemicals when chemically synthesized. Moreover, an “isolated nucleic acid” is meant to include nucleic acid fragments which are not naturally occurring as fragments and would not be found in the natural state. The term “isolated” is also used herein to refer to cells or polypeptides which are isolated from other cellular proteins or tissues. Isolated polypeptide is meant to encompass both purified and recombinant polypeptides.

[0151] As used herein, the term “recombinant” as it pertains to polypeptides or polynucleotides intends a form of the polypeptide or polynucleotide that does not exist naturally, a non-limiting example of which can be created by combining polynucleotides or polypeptides that would not normally occur together.

[0152] “Homology” or “identity” or “similarity” refers to sequence similarity between two peptides or between two nucleic acid molecules. Homology can be determined by comparing a position in each sequence which may be aligned for purposes of comparison. When a position in the compared sequence is occupied by the same base or amino acid, then the molecules are homologous at that position. A degree of homology between sequences is a function of the number of matching or homologous positions shared by the sequences. An “unrelated” or “non-homologous” sequence shares less than 40% identity, though preferably less than 25% identity, with one of the sequences of the present disclosure.

[0153] A polynucleotide or polynucleotide region (or a polypeptide or polypeptide region) has a certain percentage (for example, 60%, 65%, 70%, 75%, 80%, 85%, 90%, 95%, 98% or 99%) of “sequence identity” to another sequence means that, when aligned, that percentage of bases (or amino acids) are the same in comparing the two sequences. This alignment and the percent homology or sequence identity can be determined using software programs known in the art, for example those described in Ausubel et al. eds. (2007) Current Protocols in Molecular Biology. Preferably, default parameters are used for alignment. One alignment program is BLAST, using default parameters. In particular, programs are BLASTN and BLASTP, using the following default parameters: Genetic code=standard; filter=none; strand=both; cutoff=60; expect=10; Matrix=BLOSUM62; Descriptions=50 sequences; sort by=HIGH SCORE; Databases=non-redundant, GenBank+EMBL+DDBJ+PDB+GenBank CDS translations+SwissProtein+SPupdate+PIR. Details of these programs can be found at the World Wide Web (www) ncbi.nlm.nih.gov/blast/Blast.cgi, last accessed on May 21, 2008. Biologically equivalent polynucleotides are those having the above-noted specified percent homology and encoding a polypeptide having the same or similar biological activity.

[0154] The term “an equivalent nucleic acid or polynucleotide” refers to a nucleic acid having a nucleotide sequence having a certain degree of homology, or sequence identity, with the nucleotide sequence of the nucleic acid or complement thereof. A homolog of a double stranded nucleic acid is intended to include nucleic acids having a nucleotide sequence which has a certain degree of homology with or with the complement thereof. In one aspect, homologs of nucleic acids are capable of hybridizing to the nucleic acid or complement thereof. Likewise, “an equivalent polypeptide” refers to a polypeptide having a certain degree of homology, or sequence identity, with the amino acid sequence of a reference polypeptide. In some aspects, the sequence identity is at least about 70%, 75%, 80%, 85%, 90%, 95%, 98%, or 99%. In some aspects, the equivalent sequence retains the activity (e.g., epitope-binding) or structure (e.g., salt-bridge) of the reference sequence.

[0155] Hybridization reactions can be performed under conditions of different “stringency”. In general, a low stringency hybridization reaction is carried out at about 40° C. in about 10×SSC or a solution of equivalent ionic strength/temperature. A moderate stringency hybridization is typically performed at about 50° C. in about 6×SSC, and a high stringency hybridization reaction is generally performed at about 60° C. in about 1×SSC. Hybridization reactions can also be performed under “physiological conditions” which is well known to one of skill in the art. A non-limiting example of a physiological condition is the temperature, ionic strength, pH and concentration of Mg²+ normally found in a cell.

[0156] A polynucleotide is composed of a specific sequence of four nucleotide bases: adenine (A); cytosine (C); guanine (G); thymine (T); and uracil (U) for thymine when the polynucleotide is RNA. Thus, the term “polynucleotide sequence” is the alphabetical representation of a polynucleotide molecule. This alphabetical representation can be input into databases in a computer having a central processing unit and used for bioinformatics applications such as functional genomics and homology searching. The term “polymorphism” refers to the coexistence of more than one form of a gene or portion thereof. A portion of a gene of which there are at least two different forms, i.e., two different nucleotide sequences, is referred to as a “polymorphic region of a gene”. A polymorphic region can be a single nucleotide, the identity of which differs in different alleles.

[0157] The terms “polynucleotide” and “oligonucleotide” are used interchangeably and refer to a polymeric form of nucleotides of any length, either deoxyribonucleotides or ribonucleotides or analogs thereof. Polynucleotides can have any three-dimensional structure and may perform any function, known or unknown. The following are non-limiting examples of polynucleotides: a gene or gene fragment (for example, a probe, primer, EST or SAGE tag), exons, introns, messenger RNA (mRNA), transfer RNA, ribosomal RNA, ribozymes, cDNA, dsRNA, siRNA, miRNA, recombinant polynucleotides, branched polynucleotides, plasmids, vectors, isolated DNA of any sequence, isolated RNA of any sequence, nucleic acid probes and primers. A polynucleotide can comprise modified nucleotides, such as methylated nucleotides and nucleotide analogs. If present, modifications to the nucleotide structure can be imparted before or after assembly of the polynucleotide. The sequence of nucleotides can be interrupted by non-nucleotide components. A polynucleotide can be further modified after polymerization, such as by conjugation with a labeling component. The term also refers to both double- and single-stranded molecules. Unless otherwise specified or required, any embodiment of this disclosure that is a polynucleotide encompasses both the double-stranded form and each of two complementary single-stranded forms known or predicted to make up the double-stranded form.

[0158] The term “encode” as it is applied to polynucleotides refers to a polynucleotide which is said to “encode” a polypeptide if, in its native state or when manipulated by methods well known to those skilled in the art, it can be transcribed and/or translated to produce the mRNA for the polypeptide and/or a fragment thereof. The antisense strand is the complement of such a nucleic acid, and the encoding sequence can be deduced therefrom.

[0159] As used herein, the term “detectable label” intends a directly or indirectly detectable compound or composition that is conjugated directly or indirectly to the composition to be detected, e.g., polynucleotide or protein such as an antibody so as to generate a “labeled” composition. The term also includes sequences conjugated to the polynucleotide that will provide a signal upon expression of the inserted sequences, such as green fluorescent protein (GFP) and the like. The label may be detectable by itself (e.g. radioisotope labels or fluorescent labels) or, in the case of an enzymatic label, may catalyze chemical alteration of a substrate compound or composition which is detectable. The labels can be suitable for small scale detection or more suitable for high-throughput screening. As such, suitable labels include, but are not limited to radioisotopes, fluorochromes, chemiluminescent compounds, dyes, and proteins, including enzymes. The label may be simply detected or it may be quantified. A response that is simply detected generally comprises a response whose existence merely is confirmed, whereas a response that is quantified generally comprises a response having a quantifiable (e.g., numerically reportable) value such as an intensity, polarization, and/or other property. In luminescence or fluorescence assays, the detectable response may be generated directly using a luminophore or fluorophore associated with an assay component actually involved in binding, or indirectly using a luminophore or fluorophore associated with another (e.g., reporter or indicator) component.

[0160] As used herein, an “antibody” or “antigen-binding polypeptide” refers to a polypeptide or a polypeptide complex that specifically recognizes and binds to an antigen. An antibody can be a whole antibody and any antigen binding fragment or a single chain thereof. Thus the term “antibody” includes any protein or peptide containing molecule that comprises at least a portion of an immunoglobulin molecule having biological activity of binding to the antigen. Examples of such include, but are not limited to a complementarity determining region (CDR) of a heavy or light chain or a ligand binding portion thereof, a heavy chain or light chain variable region, a heavy chain or light chain constant region, a framework (FR) region, or any portion thereof, or at least one portion of a binding protein.

[0161] The terms “antibody fragment” or “antigen-binding fragment”, as used herein, is a portion of an antibody such as F(ab′)₂, F(ab)₂, Fab′, Fab, Fv, scFv and the like. Regardless of structure, an antibody fragment binds with the same antigen that is recognized by the intact antibody. The term “antibody fragment” includes aptamers, spiegelmers, and diabodies. The term “antibody fragment” also includes any synthetic or genetically engineered protein that acts like an antibody by binding to a specific antigen to form a complex.

[0162] A “single-chain variable fragment” or “scFv” refers to a fusion protein of the variable regions of the heavy (V_{H}) and light chains (V_{L}) of immunoglobulins. In some aspects, the regions are connected with a short linker peptide of ten to about 25 amino acids. The linker can be rich in glycine for flexibility, as well as serine or threonine for solubility, and can either connect the N-terminus of the V_{H} with the C-terminus of the V_{L}, or vice versa. This protein retains the specificity of the original immunoglobulin, despite removal of the constant regions and the introduction of the linker. ScFv molecules are known in the art and are described, e.g., in U.S. Pat. No. 5,892,019.

[0163] A “tandem scFv” is composed of two scFvs connected through a short linker, which allows the free rotation of the two separate antigen binding units, thus resulting in a flexible structure.

[0164] The term antibody encompasses various broad classes of polypeptides that can be distinguished biochemically. Those skilled in the art will appreciate that heavy chains are classified as gamma, mu, alpha, delta, or epsilon with some subclasses among them (e.g., .gamma.1-.gamma.4). It is the nature of this chain that determines the “class” of the antibody as IgG, IgM, IgA IgG, or IgE, respectively. The immunoglobulin subclasses (isotypes) e.g., IgG₁, IgG₂, IgG₃, IgG₄, IgG₅, etc. are well characterized and are known to confer functional specialization. Modified versions of each of these classes and isotypes are readily discernable to the skilled artisan in view of the instant disclosure and, accordingly, are within the scope of the instant disclosure. All immunoglobulin classes are clearly within the scope of the present disclosure, the following discussion will generally be directed to the IgG class of immunoglobulin molecules. With regard to IgG, a standard immunoglobulin molecule comprises two identical light chain polypeptides of molecular weight approximately 23,000 Daltons, and two identical heavy chain polypeptides of molecular weight 53,000-70,000. The four chains are typically joined by disulfide bonds in a “Y” configuration wherein the light chains bracket the heavy chains starting at the mouth of the “Y” and continuing through the variable region.

[0165] Antibodies, antigen-binding polypeptides, variants, or derivatives thereof of the disclosure include, but are not limited to, polyclonal, monoclonal, multispecific, human, humanized, primatized, or chimeric antibodies, single chain antibodies, epitope-binding fragments, e.g., Fab, Fab′ and F(ab)₂, Fd, Fvs, single-chain Fvs (scFv), single-chain antibodies, disulfide-linked Fvs (sdFv), fragments comprising either a V_{K} or V_{H} domain, fragments produced by a Fab expression library, and anti-idiotypic (anti-Id) antibodies (including, e.g., anti-Id antibodies to LIGHT antibodies disclosed herein). Immunoglobulin or antibody molecules of the disclosure can be of any type e.g., IgG, IgE, IgM, IgD, IgA, and IgY), class (e.g., IgG1, IgG2, IgG3, IgG4, IgA1 and IgA2) or subclass of immunoglobulin molecule.

[0166] Light chains are classified as either kappa or lambda. Each heavy chain class may be bound with either a kappa or lambda light chain. In general, the light and heavy chains are covalently bonded to each other, and the “tail” portions of the two heavy chains are bonded to each other by covalent disulfide linkages or non-covalent linkages when the immunoglobulins are generated either by hybridomas, B cells or genetically engineered host cells. In the heavy chain, the amino acid sequences run from an N-terminus at the forked ends of the Y configuration to the C-terminus at the bottom of each chain.

[0167] Both the light and heavy chains are divided into regions of structural and functional homology. The terms “constant” and “variable” are used functionally. In this regard, it will be appreciated that the variable domains of both the light (V_{K}) and heavy (V_{H}) chain portions determine antigen recognition and specificity. Conversely, the constant domains of the light chain (CK) and the heavy chain (CH1, CH2 or CH3) confer important biological properties such as secretion, transplacental mobility, Fc receptor binding, complement binding, and the like. By convention the numbering of the constant region domains increases as they become more distal from the antigen-binding site or amino-terminus of the antibody. The N-terminal portion is a variable region and at the C-terminal portion is a constant region: the CH3 and CK domains actually comprise the carboxy-terminus of the heavy and light chain, respectively.

[0168] As indicated above, the variable region allows the antibody to selectively recognize and specifically bind epitopes on antigens. That is, the V_{K} domain and V_{H} domain, or subset of the complementarity determining regions (CDRs), of an antibody combine to form the variable region that defines a three dimensional antigen-binding site. This quaternary antibody structure forms the antigen-binding site present at the end of each arm of the Y. More specifically, the antigen-binding site is defined by three CDRs on each of the V_{H} and V_{K} chains i.e. CDR-H1, CDR-H2, CDR-H3, CDR-L1, CDR-L2 and CDR-L3). In some instances, e.g., certain immunoglobulin molecules derived from camelid species or engineered based on camelid immunoglobulins, a complete immunoglobulin molecule may consist of heavy chains only, with no light chains. See, e.g., Hamers-Casterman et al., Nature 363:446-448 (1993).

[0169] In naturally occurring antibodies, the six “complementarity determining regions” or “CDRs” present in each antigen-binding domain are short, non-contiguous sequences of amino acids that are specifically positioned to form the antigen-binding domain as the antibody assumes its three dimensional configuration in an aqueous environment. The remainder of the amino acids in the antigen-binding domains, referred to as “framework” regions, show less inter-molecular variability. The framework regions largely adopt a b-sheet conformation and the CDRs form loops which connect, and in some cases form part of, the .beta.-sheet structure. Thus, framework regions act to form a scaffold that provides for positioning the CDRs in correct orientation by inter-chain, non-covalent interactions. The antigen-binding domain formed by the positioned CDRs defines a surface complementary to the epitope on the immunoreactive antigen. This complementary surface promotes the non-covalent binding of the antibody to its cognate epitope. The amino acids comprising the CDRs and the framework regions, respectively, can be readily identified for any given heavy or light chain variable region by one of ordinary skill in the art, since they have been precisely defined (see “Sequences of Proteins of Immunological Interest,” Kabat, E., et al., U.S. Department of Health and Human Services, (1983); and Chothia and Lesk, J. Mol. Biol., 196:901-917 (1987), which are incorporated herein by reference in their entireties).

[0170] In the case where there are two or more definitions of a term which is used and/or accepted within the art, the definition of the term as used herein is intended to include all such meanings unless explicitly stated to the contrary. A specific example is the use of the term “complementarity determining region” (“CDR”) to describe the non-contiguous antigen combining sites found within the variable region of both heavy and light chain polypeptides. This particular region has been described by Kabat et al., U.S. Dept. of Health and Human Services, “Sequences of Proteins of Immunological Interest” (1983) and by Chothia et al., J. Mol. Biol. 196:901-917 (1987), which are incorporated herein by reference in their entireties. The CDR definitions according to Kabat and Chothia include overlapping or subsets of amino acid residues when compared against each other. Nevertheless, application of either definition to refer to a CDR of an antibody or variants thereof is intended to be within the scope of the term as defined and used herein. The appropriate amino acid residues which encompass the CDRs as defined by each of the above cited references are set forth in the table below as a comparison. The exact residue numbers which encompass a particular CDR will vary depending on the sequence and size of the CDR. Those skilled in the art can routinely determine which residues comprise a particular CDR given the variable region amino acid sequence of the antibody.

[0171] Kabat et al. also defined a numbering system for variable domain sequences that is applicable to any antibody. One of ordinary skill in the art can unambiguously assign this system of “Kabat numbering” to any variable domain sequence, without reliance on any experimental data beyond the sequence itself. As used herein, “Kabat numbering” refers to the numbering system set forth by Kabat et al., U.S. Dept. of Health and Human Services, “Sequence of Proteins of Immunological Interest” (1983).

[0172] In addition to table above, the Kabat number system describes the CDR regions as follows: CDR-H 1 begins at approximately amino acid 31 (i.e., approximately 9 residues after the first cysteine residue), includes approximately 5-7 amino acids, and ends at the next tryptophan residue. CDR-H2 begins at the fifteenth residue after the end of CDR-H1, includes approximately 16-19 amino acids, and ends at the next arginine or lysine residue. CDR-H3 begins at approximately the thirty third amino acid residue after the end of CDR-H2; includes 3-25 amino acids; and ends at the sequence W-G-X-G, where X is any amino acid. CDR-L1 begins at approximately residue 24 (i.e., following a cysteine residue); includes approximately 10-17 residues; and ends at the next tryptophan residue. CDR-L2 begins at approximately the sixteenth residue after the end of CDR-LI and includes approximately 7 residues. CDR-L3 begins at approximately the thirty third residue after the end of CDR-L2 (i.e., following a cysteine residue); includes approximately 7-11 residues and ends at the sequence For W-G-X-G, where X is any amino acid.

[0173] Antibodies disclosed herein may be from any animal origin including birds and mammals. Preferably, the antibodies are human, murine, donkey, rabbit, goat, guinea pig, camel, llama, horse, or chicken antibodies. In another embodiment, the variable region may be condricthoid in origin (e.g., from sharks).

[0174] As used herein, the term “heavy chain constant region” includes amino acid sequences derived from an immunoglobulin heavy chain. A polypeptide comprising a heavy chain constant region comprises at least one of: a CH1 domain, a hinge (e.g., upper, middle, and/or lower hinge region) domain, a CH2 domain, a CH3 domain, or a variant or fragment thereof. For example, an antigen-binding polypeptide for use in the disclosure may comprise a polypeptide chain comprising a CH1 domain; a polypeptide chain comprising a CH1 domain, at least a portion of a hinge domain, and a CH2 domain; a polypeptide chain comprising a CH1 domain and a CH3 domain; a polypeptide chain comprising a CH1 domain, at least a portion of a hinge domain, and a CH3 domain, or a polypeptide chain comprising a CH1 domain, at least a portion of a hinge domain, a CH2 domain, and a CH3 domain. In another embodiment, a polypeptide of the disclosure comprises a polypeptide chain comprising a CH3 domain. Further, an antibody for use in the disclosure may lack at least a portion of a CH2 domain (e.g., all or part of a CH2 domain). As set forth above, it will be understood by one of ordinary skill in the art that the heavy chain constant region may be modified such that they vary in amino acid sequence from the naturally occurring immunoglobulin molecule.

[0175] The heavy chain constant region of an antibody disclosed herein may be derived from different immunoglobulin molecules. For example, a heavy chain constant region of a polypeptide may comprise a CH1 domain derived from an IgG, molecule and a hinge region derived from an IgG₃ molecule. In another example, a heavy chain constant region can comprise a hinge region derived, in part, from an IgG, molecule and, in part, from an IgG₃ molecule. In another example, a heavy chain portion can comprise a chimeric hinge derived, in part, from an IgG, molecule and, in part, from an IgG₄ molecule.

[0176] As used herein, the term “light chain constant region” includes amino acid sequences derived from antibody light chain. Preferably, the light chain constant region comprises at least one of a constant kappa domain or constant lambda domain.

[0177] A “light chain-heavy chain pair” refers to the collection of a light chain and heavy chain that can form a dimer through a disulfide bond between the CL domain of the light chain and the CH1 domain of the heavy chain.

[0178] As previously indicated, the subunit structures and three dimensional configuration of the constant regions of the various immunoglobulin classes are well known. As used herein, the term “V_{H} domain” includes the amino terminal variable domain of an immunoglobulin heavy chain and the term “CH1 domain” includes the first (most amino terminal) constant region domain of an immunoglobulin heavy chain. The CH1 domain is adjacent to the V_{H} domain and is amino terminal to the hinge region of an immunoglobulin heavy chain molecule.

[0179] As used herein the term “CH2 domain” includes the portion of a heavy chain molecule that extends, e.g., from about residue 244 to residue 360 of an antibody using conventional numbering schemes (residues 244 to 360, Kabat numbering system; and residues 231-340, EU numbering system; see Kabat et al., U.S. Dept. of Health and Human Services, “Sequences of Proteins of Immunological Interest” (1983). The CH2 domain is unique in that it is not closely paired with another domain. Rather, two N-linked branched carbohydrate chains are interposed between the two CH2 domains of an intact native IgG molecule. It is also well documented that the CH3 domain extends from the CH2 domain to the C-terminal of the IgG molecule and comprises approximately 108 residues.

[0180] As used herein, the term “hinge region” includes the portion of a heavy chain molecule that joins the CH1 domain to the CH2 domain. This hinge region comprises approximately 25 residues and is flexible, thus allowing the two N-terminal antigen-binding regions to move independently. Hinge regions can be subdivided into three distinct domains: upper, middle, and lower hinge domains (Roux et al., J. Immunol 161:4083 (1998)).

[0181] As used herein the term “disulfide bond” includes the covalent bond formed between two sulfur atoms. The amino acid cysteine comprises a thiol group that can form a disulfide bond or bridge with a second thiol group. In most naturally occurring IgG molecules, the CH1 and CK regions are linked by a disulfide bond and the two heavy chains are linked by two disulfide bonds at positions corresponding to 239 and 242 using the Kabat numbering system (position 226 or 229, EU numbering system).

[0182] As used herein, the term “chimeric antibody” will be held to mean any antibody wherein the immunoreactive region or site is obtained or derived from a first species and the constant region (which may be intact, partial or modified in accordance with the instant disclosure) is obtained from a second species. In certain embodiments the target binding region or site will be from a non-human source (e.g. mouse or primate) and the constant region is human.

[0183] As used herein, “percent humanization” is calculated by determining the number of framework amino acid differences (i.e., non-CDR difference) between the humanized domain and the germline domain, subtracting that number from the total number of amino acids, and then dividing that by the total number of amino acids and multiplying by 100.

[0184] By “specifically binds” or “has specificity to,” it is generally meant that an antibody binds to an epitope via its antigen-binding domain, and that the binding entails some complementarity between the antigen-binding domain and the epitope. According to this definition, an antibody is said to “specifically bind” to an epitope when it binds to that epitope, via its antigen-binding domain more readily than it would bind to a random, unrelated epitope. The term “specificity” is used herein to qualify the relative affinity by which a certain antibody hinds to a certain epitope. For example, antibody “A” may be deemed to have a higher specificity for a given epitope than antibody “B,” or antibody “A” may be said to bind to epitope “C” with a higher specificity than it has for related epitope “D.”

[0185] As used herein, the terms “treat” or “treatment” refer to both therapeutic treatment and prophylactic or preventative measures, wherein the object is to prevent or slow down (lessen) an undesired physiological change or disorder, such as the progression of cancer. Beneficial or desired clinical results include, but are not limited to, alleviation of symptoms, diminishment of extent of disease, stabilized (i.e., not worsening) state of disease, delay or slowing of disease progression, amelioration or palliation of the disease state, and remission (whether partial or total), whether detectable or undetectable. “Treatment” can also mean prolonging survival as compared to expected survival if not receiving treatment. Those in need of treatment include those already with the condition or disorder as well as those prone to have the condition or disorder or those in which the condition or disorder is to be prevented.

[0186] By “subject” or “individual” or “animal” or “patient” or “mammal,” is meant any subject, particularly a mammalian subject, for whom diagnosis, prognosis, or therapy is desired. Mammalian subjects include humans, domestic animals, farm animals, and zoo, sport, or pet animals such as dogs, cats, guinea pigs, rabbits, rats, mice, horses, cattle, cows, and so on.

[0187] As used herein, phrases such as “to a patient in need of treatment” or “a subject in need of treatment” includes subjects, such as mammalian subjects, that would benefit from administration of an antibody or composition of the present disclosure used, e.g., for detection, for a diagnostic procedure and/or for treatment.

[0188] This disclosure describes the development of bispecific antibodies, which can be applied to cancer therapy. To accomplish this goal, two tetrameric bispecific antibodies (tBsAbs) with dual specificity for the GITR protein and the PD-L1 protein were created. An advantage of these constructs is that they will enhance anti-tumor response by activating T cells and abrogating regulatory T cell suppression. Also described are the anti-CCR4-anti-PDL1 tBsAb (FIGS. 3 and 4) and anti-CAIX-anti-PDL1 (FIGS. 5 and 6).

[0189] Here is described two different formats of tandem scFv fragment dimerization units in a pcDNA3.4 mammalian expression vector. In the first construct, the tandem scFvs comprise two scFvs derived from distinct parental antibodies. The αGITR scFv and αPD-L1 scFv are connected in tandem by an IgG1 hinge region between two flexible linkers. The first construct has a structure of VH GITR10-linker-VL GITR10-linker-hinge-linker-VH PD-L1-linker-VL PD-L1 and its sequence was confirmed by DNA sequencing. The second format was constructed equivalently to the first one. Yet, it includes an additional domain, e.g., a CH2 domain, introduced between the hinge and one linker region. The second construct has a structure of VH GITR-linker-VL GITR-linker-hinge-CH2-linker-VH PD-L1-linker-VL PD-L1. In contrast to the first construct, the second construct includes an Fc domain, potentially resulting in a trifunctional tBsAb.

[0190] Both tBsAbs were successfully expressed by transient transfection in HEK cells and purified by affinity chromatography using Ni-NTA agarose.

[0191] The purified proteins were evaluated by SDS-PAGE and results showed that under reducing conditions all protein profiles of the tBsAbs exhibit one single band and are congruent with the theoretical value of a tandem scFv (taFv): 65 kDa for αGITR-αPD-L1 taFv and 75 kDA for αGITR-αPD-L1 with CH2 taFv. Under non-reducing conditions the predicted molecular weight of αGITR-αPD-L1 (130 kDa) and αGITR-αPD-L1 with CH2 (150 kDa) tBsAbs match the apparent molecular weight (See, FIG. 18).

[0192] ELISA and flow cytometry demonstrated the biological activities of the newly designed tBsAbs. In ELISA the retained binding activity of the αPD-L1 arm of the produced BsAb was preserved in vitro and showed similar binding activity as the αPD-L1 mAb. Unspecific binding of the tBsAbs was to be ruled out since CCR4, to which the αGITR-αPD-L1 antibodies do not bind, did not show any signal. Furthermore, similar binding activity of the αGITR arm for both produced BsAb (αGITR-αPD-L1 and αGITR-αPD-L1 with CH2) to the GITR protein was observed. Unspecific binding was likewise excluded from this arm since the αGITR-αPD-L1 antibodies did not show any binding specificity for GITR-CF2 cells. When comparing the αGITR IgG to each BsAb, the αGITR IgG showed higher binding in the ELISA experiment, suggesting a lower affinity of the tBsAbs. Nevertheless depending on the spatial arrangement of the antigen binding sites as well as the antigen surface distribution bivalency of the tBsAbs can increase avidity, which can compensate for weak binding.

[0193] The flow cytometry analyses of αGITR-αPD-L1 tested with GITR+CF2 cells suggests that the novel tBsAb recognize the GITR protein in its native conformation when expressed on cells. A similar binding affinity of the αGITR-αPD-L1 tBsAbcompared to the GITR mAb was observed. The ELISA and Flow cytometry analyses therefore demonstrated the capability of the αGITR10-αPD-L1 and αGITR10-αPD-L1 with CH2 to specifically recognize the corresponding antigen when expressed on cells, as would be the case in vivo. These characterization studies exhibited similar binding behavior of the αGITR-αPD-L1 and αGITR-αPD-L1 with CH2.

[0194] An important aspect of the αGITR10-αPD-L1 with CH2 lays in its function in inducing complement-dependent cytotoxicity (CDC) and antibody-dependent cellular cytotoxicity (ADCC). These functions further the beneficial effects of the tBsAb when targeting tumor cells for destruction.

[0195] In the ADCC analysis the αGITR10-αPD-L1 and αGITR10-αPD-L1 with CH2 displayed surprising results using GITR+CF2 as target cells and WIL2-S as effector cells (E/T=5:1). For αGITR10-αPD-L1 and αGITR10-αPD-L1 with CH2 antibodies the raw signal of the luciferase activity decreased with higher antibody concentrations and was substantially lower than the signal for sole target and effector cells (See FIG. 30).

[0196] The herein-described methods allow generation of tBsAb involving only one cloning step. The tBsAb preserves the dual affinity towards the GITR protein and PD-L1 antigen in a small-sized molecule of only about 150 kDa. Such tBsAbs will be critical for effective cancer therapeutics.

### EXAMPLES

### Example 1: Cloning of αGITR-αPD-L1 Tetrameric Bispecific Antibody (tBsAb)

[0197] Cloning Strategy

[0198] The goal was to clone a plasmid that contained two recombinant single chain variable fragments (scFvs), originating from different parental antibodies and joined by a flexible linker. While one of the scFvs is directed against the GITR protein, the other is directed against PD-L1. Such a plasmid will produce two scFvs that are covalently joined by a linker-hinge-linker domain and result in a tetrameric bispecific antibody (αGITR-αPD-L1 tBsAb).

[0199] The mammalian expression vector pcDNA3.4 plasmid was the basis for constructs (V_{H}GITR-linker-V_{L}GITR-linker-hinge-linker-V_{H}PD-L1-linker-V_{L}PD-L1). The fundamental structure of pcDNA 3.4 expression vector contained beforehand the V_{H}^{X}-linker-V_{L}^{X}-linker-hinge-linker-V_{H}PD-L1-linker-V_{L}PD-L1 gene fused to an N-terminal 6×-His tag (SEQ ID NO: 1084) (FIG. 12).

[0200] Restriction Enzyme Digestion and Ligation

[0201] Six αGITR scFv gene sequences were individually cloned into the pcDNA3.4 expression vector. The six V_{H}GITR-linker-V_{L}GITR gene sequences were labeled as V_{H}GITRL1-V_{L}GITRL1, V_{H}GITRL10-V_{L}GITRL10, V_{H}GITRL11-V_{L}GITRL11, V_{H}GITRL14-V_{L}GITRL14, V_{H}GITRL15-V_{L}GITRL15 and V_{H}GITRL17-V_{L}GITRL17. All six αGITR gene sequences are flanked by SfiI and NotI restriction sites and were isolated from the respective donor plasmids by digestion (Table 1). Similarly, the pcDNA3.4 expression vector was also digested with the SfiI and NotI restriction enzymes. The digested vectors and fragments were analyzed on a 1% agarose gel and were purified using a QIAquick Gel Extraction Kit. Cohesive inserts from the SfiI and NotI digestion were ligated into the corresponding vector pcDNA 3.4 at a fivefold molar ratio using the T4 Ligation Kit. Fifty nanograms of the recipient vector were used per ligation reaction. The ligation product resulted in the final configuration of V_{H}GITR-linker-V_{L}GITR-linker-hinge-linker-V_{H}PD-L1-linker-V_{L}PD-L1 (FIG. 12).

[0202] Three additional clones were constructed each to generate the control antibodies. The F10 gene was chosen as the ‘control arm’; since V_{H}F10-V_{L}F10 binding domain does not have binding affinity to GITR nor to PD-L1 protein. Thus, this domain was defined as negative control. F10 is a validated antibody directed against influenza HA protein. To keep the same antibody format, its gene sequences only replace either V_{H}GITR1-linker-V_{L}GITR1 or V_{H}PD-L1-linker-V_{L}PD-L1, respectively. The three control plasmids exhibit the following sequencing order:
[0203] (1) V_{H}F10-linker-V_{L}F10-linker-hinge-linker-V_{H}PD-L1-linker-V_{L}PD-L1 (F10-αPD-L1)
[0204] (2) V_{H}GITR1-linker-V_{L}GITR1-linker-hinge-linker-V_{H}F10-linker-V_{L}F10 (αGITR1-F10)
[0205] (3) V_{H}GITR10-linker-V_{L}GITR10-linker-hinge-linker-V_{H}F10-linker-V_{L}F10 (αGITR10-F10)

[0206] Construction of Plasmid (1):

[0207] The V_{H}F10-linker-V_{L}F10 gene was isolated from a pcDNA 3.1 vector through the digestion with SfiI and NotI RE. As for the expression vector, the same pcDNA3.4 vector was used (FIG. 13). It contains the SfiI and NotI restriction sites at the desired site of insertion and was therefore digested with the corresponding restriction enzymes. The final plasmid was obtained by ligating both digested products to each other. The ligation was performed using T4 Ligation Kit at 16° C. overnight.

[0208] Procedure for the Construction of Plasmids (2) and (3):

[0209] In order to replace the αPD-L1 scFv in the previous construct, a forward and a reverse primer were designed and synthesized to introduce the BsiWI and BamHI restriction site and the 5′ and 3′ of the V_{H}F10-linker-V_{L}F10 fragment, respectively. After PCR amplification, the PCR products containing V_{H}F10-linker-V_{L}F10 and the pcDNA3.4 expression vector were digested with BsiWI and BamHI and used to replace the DNA fragments encoding V_{H}PD-L1-linker-V_{L}PD-L1 within the previously constructed expression plasmids, V_{H}GITR¹-linker-V_{L}GITR¹-linker-hinge-linker-V_{H}PD-L1-linker-V_{L}PD-L1 and V_{H}GITR¹⁰-linker-V_{L}GITR¹⁰-linker-hinge-linker-V_{H}PD-L1-linker-V_{L}PD-L1. The digested expression vector and inserts were gel-purified (1% agarose) using QIAquick gel extraction Kit and subsequently ligated to each other by Quick ligation (5 minutes, at RT). This procedure yielded the plasmids (2) and (3) (FIG. 14).

[0210] Primer Design for the Construction of the Control Plasmid Constructs

[0211] As described above, two primers were designed for control plasmids (2) and (3) to isolate V_{H}F10-linker-V_{L}F10. The forward primer (5′-3′) was designed to bind on the 3′ prime end of the complementary strand of the DNA; the reverse primers (3′-5′) were designed to bind on the 3′ prime end of the main DNA strand and were reverse complementary. The primers were about 20 bp long with an optimal melting temperature between 62 and 65° C. and not deviating more than ±1° C. The forward primer (containing the BsiWI restriction site (No. 1) and the reverse primer (containing the BamHI restriction site (No. 2)) were synthesized by Genewiz. For the PCR reaction 100 ng DNA template (pcDNA 3.1) was used in the thermal cycling. The PCR product was purified with a QIAquick PCR Purification Kit according to the manufactures protocol and analyzed on a 1% agarose gel.

### Example 2: Cloning of αGITR10-αPD-L1 Tetrameric Bispecific Antibody (tBsAb) Containing a CH2 Domain

[0212] Cloning Strategy

[0213] The aim of this example was to introduce a CH2 domain from an IgG1 into the previously-constructed plasmid, leading to the basic structure of V_{H}GITR-linker-V_{L}GITR-linker-hinge-CH2-linker-V_{H}PD-L1-linker-V_{L}PD-L1. The addition of CH2 adds an effector function, resulting in a trifunctional tBsAb.

[0214] The pcDNA3.4 expression vector containing αGITR10-αPDL1 served as the template used for the construction of the new plasmid. A new restriction site HindIII was introduced by site-directed mutagenesis between the IgG1 hinge region and the linker (GGGGS)₆ (SEQ ID NO: 1909). This newly constructed restriction site served as the cloning site for the IgG1 constant CH2 domain (see FIG. 15). The HindIII restriction site was chosen for several reasons. The HindIII restriction site is unique in the plasmid and its genomic sequence is not similar to its adjacent coding region. Nevertheless, HindIII features some drawbacks such as the relative long length (6 nucleotides) possibly diminishing the mutagenesis efficacy.

[0215] The IgG1 plasmid was used as a template to isolate the CH2 domain. The CH2 sequence was amplified by PCR using primers containing the restriction site HindIII. The pcDNA 3.4 expression vector (V_{H}GITR¹⁰-linker-V_{L}GITR¹⁰-linker-hinge-HindIII*-V_{H}PD-L1-linker-V_{L}PD-L1) and the amplified CH2 fragments were digested with the corresponding restriction enzymes. The digested vectors and fragments were gel-purified (1% agarose) using QIAquick gel extraction Kit. Cohesive inserts from the HindIII digest were ligated into the vector (pcDNA 3.4) with twentyfold insert using the Quick Ligation Kit resulting in the construction of a new plasmid V_{H}GITR¹⁰-linker-V_{L}GITR¹⁰-linker-hinge-CH2-linker-V_{H}PD-L1-linker-V_{L}PD-L1.

[0216] Site-Directed Mutagenesis

[0217] Mutagenesis of the GITR10-PDL1 vector was accomplished with the use of QuikChange Lightning Site-Directed Mutagenesis Kit (Aligent technologies®) following the manufacturer's protocol. Two oligonucleotide primers were synthesized, each complementary to the opposite strand of the vector. Both primers contained HindIII as the desired mutation.

[0218] The primers were designed to exhibit the HindIII mutation in the middle of the primer flanked by 7 to 10 bases. The oligonucleotide primers were used for extension by PfuUltra HF DNA Polymerase during temperature cycling. This approach enabled the generation of a mutated plasmid containing staggered nicks. During the next temperature cycle, the product was treated with DpnI to digest the parental DNA template containing methylated and hemimethylated DNA. As a control, the 4.5-kp pWhitescript plasmid was used to test the mutant plasmid. The pWhitescript plasmid codes a stop codon (TAA) at the position where a glutamine codon would appear in the β-galactosidase gene of the pBluescript II, usually obliterating the blue color of the colonies on LB-ampicillin agar plate containing IPTG and Xgal. However, the oligonucleotide control primers create a point mutation on the pWhitescript 4.5-kb control plasmid that reverts the T residue of the stop codon to C, thereby producing the phenotype of blue color on media containing IPTG and X-gal. After the cycling, 2 μL of the DpnI restriction enzyme was added (37° C., 5 min) to digest the parental dsDNA. The mutagenesis plasmid was then transformed into XL10Gold® Ultracompetent cells and spread on LB-ampicillin agar plates containing 80 μg/ml X-gal and 20 mM IPTG (37° C.; >16 hours). On the following day, 16 clones were picked from the LB-ampicillin plates, purified using QIAprep spin Miniprep Kit and digested with HindIII and NotI restriction enzymes to identify successfully-mutated clones. Positive clone No. 10 (GITR10-PDL1 with HindIII) was subjected to another digestion to compare it with the original plasmid GITR10-PDL1 (no HindIII). Each sample was individually digested with HindIII or BamHI and simultaneously with HindIII and BamHI-HF together, resulting in a total of six digestions (see Table 1 below).

TABLE 1
Parameters and volumes for the total six restriction
enzyme digestions

| | GITR10-PDL1 with | | | | | |
|---|---|---|---|---|---|---|
| Digestion | HindIII restriction site | | | GITR10-PDL1 | | |
| Parameters | 1 | 2 | 3 | 1 | 2 | 3 |
| Plasmid | 3.1 | 3.1 | 3.1 | 3.1 | 3.1 | 3.1 |
| (2.0 μg) [μL] | | | | | | |
| 10x Cutsmart | 3.0 | 3.0 | 3.0 | 3.0 | 3.0 | 3.0 |
| (NEB ®) [μL] | | | | | | |
| HindIII-HF | 0.5 | — | 0.5 | 0.5 | — | 0.5 |
| (20,000 U/mL, | | | | | | |
| NEB ®) [μL] | | | | | | |
| BamHI-HF | — | 0.5 | 0.5 | — | 0.5 | 0.5 |
| 20,000 | | | | | | |
| U/mL [μL] | | | | | | |
| ddH2O | ad. 30 | ad. 30 | ad. 30 | ad. 30 | ad. 30 | ad. 30 |
| (Mili-Q ®) | | | | | | |
| [μL] | | | | | | |

The six samples were incubated for 2 hours at 37° C. and analyzed in a 1% agarose gel.

[0219] The bacteria containing the positively-mutated clone No. 10 were amplified overnight at 37° C. in 120 mL YT medium followed by plasmid DNA purification, using the QIAGEN Plasmid Maxi Kit. The correct construct, containing HindIII restriction site, was confirmed by sequencing (Genewiz®, using pre-designed primers. A glycerol stock was prepared and stored at −80° C. The recipient plasmid containing HindIII domain and the CH2 fragment were digested with HindIII and subsequently ligated to each other. Ligation products were transformed by heat-pulse into XL10-Gold® Ultracompetent cells according to the protocol described herein. The correct plasmid was verified by sequencing (Genewiz®).

[0220] Transformation

[0221] Ligation products were transformed by heat-pulse into XL10-Gold® Ultracompetent cells. These cells were gently thawed on ice. For each transformation, 45 μL of the cells were mixed with 2 μL of B-Mercaptoethanol and 1.5 μL of the interested DNA. The transformation reaction was incubated for 30 minutes followed by heat-pulse in a 42° C. water bath for 40 seconds. 0.5 mL of S.O.C Medium (Life Technologies®) was added to each tube and incubated for one hour at 37° C. The transformation reaction was grown overnight on LB-ampicillin plates at 37° C.

[0222] Several colonies per ligation sample were picked individually and grown in 1.5 mL 2-YT medium for 8 hours. Plasmids of the picked clones were purified using the QIAprep Spin Miniprep Kit as specified by the manufacturer. Correct plasmids were verified by sequencing (Genewiz®). Bacteria of positive clones were grown overnight in 120 mL YT medium (37° C., 240 rpm) and plasmid DNA was purified using the QIAGEN Plasmid Maxi Kit (as per manufacturer's protocol). Glycerol stocks were prepared by adding 400 μL glycerol and 600 μL of the culture into cryotube vials and then stored at −80° C.

[0223] Cell Culture & Transfection

[0224] For protein expression 293F human cell lines 293F were obtained from Life Technologies® and 293 T adherent cell line from the ATCC cell bank. For cell-based ELISA assays, CF2-GITR cell lines were generated in the Marasco Laboratory to express GITR on cell surface.

[0225] 293F Cells in Suspension for Protein Expression

[0226] Suspension cultures of 293F cells (derived from human embryonic kidney cells; HEK cells) were maintained in Erlenmeyer flasks (Corning®) and in 293 freestyle medium (Life Technologies®) at 37° C. and with 5% CO₂. Cells were passaged during log growth phase and were diluted into an optimal density (200,000 cells/mL) with fresh medium for continued growth.

[0227] 293T and the CF2-GITR Adherent Cells

[0228] Adherent 293T or CF2-GITR cells were maintained in 75 cm2 flasks (Cellstar) and DMEM medium (Life Technologies®) supplemented with 10% FBS (fetal bovine serum) (Life Technologies®) and 1% SP (Sodium Pyruvate) (Life Technologies®) at 37° C. in 5% CO₂. Cells were passaged at 80-100% confluency and were diluted to an optimal seeding density (2×10⁶ cells) with fresh medium for continued growth.

[0229] Transfection

[0230] For the production of the tetrameric bispecific antibody (tBsAb) (αGITR1-αPD-L1, αGITR10-αPD-L1, αGITR11-αPD-L1, αGITR14-αPD-L1, αGITR15-αPD-L1, αGITR17-αPDL1 and αGITR10-αPD-L1 (with CH2)) and the control antibodies (αGITR1-F10, αGITR10-F10, F10-αPD-L1, αGITR IgG), 293 F or 293T cells were transfected with the respective plasmids.

[0231] Polyethlenimine (PEI)-Mediated Transient Transfection in 293F HEK Cells

[0232] One day before transfection, cells were passed into a final concentration of 6×10⁵ cells/mL in a total volume of 300 mL. On the day of transfection, the cell density was between 1.0×10⁶ and 1.4×10⁶ cells/mL. The respective plasmids were prepared for transfection. The overall charge of the transfection complexes is determined by the ratio of transfection reagent to the DNA. The negative charge contributed by the phosphates in the DNA backbone is offset by the positive charge of the transfection reagent. This allowed good complex formation and for neutralization of the electrostatic repulsion imparted on the DNA by the negatively-charged cell membrane. A 1:1 ratio of Plasmid:PEI allowed full binding of polymer to DNA and full condensation occurred to protect the cargo; however, the excess of PEI is critical for overcoming the inhibitory effects of the anionic cell surface. For every million cells, 1 μg plasmid and 3 μg PEI were used for transfection and each was diluted into 15 mL Opti-MEM (Reduced Serum Medium) (Life Technologies®) separately. Diluted PEI was added to the plasmid and incubated at RT for 20 minutes. The efficiency of neutralization increases with time of exposure to the PEI-DNA complex; however excessively long exposure to lipid reagents can be toxic. The PEI/Plasmid complex was poured into the 293F suspension cells (1×10⁶ cells/mL; 300 mL per flask) and was incubated at 37° C. at 140 rpm for 6 days.

[0233] Polyethlenimine (PEI) Mediated Transient Transfection in 293T HEK Cells

[0234] Transfection of 293T HEK with use of PEI cells follows the same protocol as described above for the 293F suspension HEK cells with a couple of small changes. Transfection was done on 293T cells growing at 80% confluency in tissue culture dishes (200 mm) diluted DMEM medium supplemented with 10% FBS. For 40 μg of DNA, 200 μg of PEI was used (a 1:5 ratio) and each was diluted separately in 1 mL Opti-MEM (Reduced Serum Medium) (Life Technologies®) separately. The diluted PEI was added to the plasmid and stored at RT for 20 minutes. The DNA/PEI complex was added gently, drop wise, into the dish to prevent cell detachment and death. The cells were then incubated at 37° C. for 2 days.

### Example 3: Protein Purification

[0235] Ni-NTA Purification of Bispecific Antibody Antibodies

[0236] Suspension of 293 HEK cells were harvested and centrifuged at 5000 rpm, 4° C. for 35 minutes. To purify the bi-specific antibodies via their N-terminal 6× His-tags (SEQ ID NO: 1084), the filtered supernatant (0.22 μm PEV, Costar®) was incubated for 2 hours (240 rpm, RT) with 1 mL of Ni-NTA agarose (Qiagen). The supernatant was passed twice over a 15 ml Ni-NTA Sepharose gravity flow column. After washing, the column containing the beads were washed with four column volumes of Ni-NTA washing buffer (0.02M Imidazole, 0.3M NaCl, 1M Tris HCl (pH=7.0)) the protein was slowly eluted with 13 mL of Ni-NTA elution buffer (0.5M Imidazole, 0.3 NaCl, 0.02 Tris HCl (pH=7.0)). The buffer of the eluted protein was exchanged by PBS buffer using centrifugal filter units 100,000 MW (Amicon®). The yield of the tBsAbs and was measured with the NanoDrop ND-1000.

[0237] Protein A Purification of αGITR IgG Antibody

[0238] The αGITR IgG antibodies were harvested from the suspension of 293 HEK cells and centrifuged at 5000 rpm, 4° C. for 35 minutes. To purify the αGITR IgG antibodies via the Fc domain, the filtered supernatant was incubated (RT, shaking) with 1 mL of Protein A (GE Lifesciences) for 2 hours then passed twice over a 15 ml gravity flow column (Biorad) followed by 10 mL PBS for washing. The αGITR IgG was eluted with 2 ml TEA (100 nM) and 200 μL of Tris-HCl (1M, (pH=7)) was added to the elution in order to neutralize TEA. An additional 2 mL PBS was added onto column, and was collected into the tube with the eluted protein.

### Example 4: Protein Characterization

[0239] SDS-PAGE Analysis

[0240] SDS-PAGE analysis was used to verify the purity of proteins, according to the NuPAGE NuPAGE® technical guide (Invitrogen). NuPAGE Bis-Tris Gels (4-12%) (Novex) were used in MES SDS running buffer, with a total protein amount between 3 μg and 5 μg. The protein samples were mixed with 4× LDS sample buffer (Novex), containing dodecylsulfate, to denature the protein. Under reducing conditions the protein samples were additionally boiled at 100° C. for 10 minutes. The samples were then loaded onto Novex Bis-Tris Gels in MES SDS running buffer. The gel was run in a Xcell SureLock Mini-Cell at 200V for 35 minutes and then processed with Coomassie G-250 staining with simplyBlue™ Safe Stain (Novex).

[0241] Direct ELISA of αGITR-αPD-L1 on Passively Adsorbed Soluble PD-L1 Antigen

[0242] A Maxisorb 96 well plate (Costar®) was coated with 100 μL of 5 μg/mL PD-L1 rabbit Fc antigen and CCR4 protein (negative control) in PBS overnight at RT. On the following day, the plate was washed 3 times with PBS and blocked for 2 hours at RT with 200 μL blocking solution (2% BSA in PBS). The plate was washed 3 times with PBS. The primary antibodies αGITR1-αPD-L1, αGITR10-αPD-L1, αGITR11-αPD-L1, αGITR14-αPD-L1, αGITR15-αPD-L1, αGITR17-αPD-L1, F10-αPD-L1 BsAB and commercial anti-mouse PD-L1 mAb (Biolegend) prepared in 1× PBS with variable concentrations and added to the wells (100 μL) for 2 hours incubation at room temperature. The highest concentration of antibody tested was at 1 μg/mL and then serially diluted in a ten-fold manner until the 1×10⁻⁵ μg/mL dilution. Each sample was run in triplicate at every concentration. Several controls were set-up and are listed in the table below (Table 2). The 96 well plate (Costar) was washed three times with 1× PBS buffer. A solution of the secondary antibody (6× His-HRP (Thermoscientific) (“6× His” disclosed as SEQ ID NO: 1084) and Goat anti-mouse IgG Fc, HRP conjugate (Thermoscientific) were diluted (1:2000 and 1:5000) in 1× PBS. The secondary antibodies (100 μL) were added to each well and incubated for 2 hours at room temperature. Finally, each well was washed four times with PBS. The 96 well plate was developed with 100 μL TBM substrate solution (Thermoscientific); after development 100 μL phosphoric acid stop solution (Thermoscientific) was added. The endpoint OD data was recorded at 450 nm with Bio-Rad Benchmark Plus and analyzed with the Microplate Manager 5.2.1 software.

TABLE 2
Experimental Overview on tested samples and controls
for direct ELISA of αGITR-αPD-L1 on passively adsorbed
PD-1 antigen (“6xHis” disclosed as SEQ ID NO: 1084)

| | Test- | Primary | Secondary | | Expected |
|---|---|---|---|---|---|
| Antigen | Type | AB | AB | Purpose | signal |
| PD-L1 | Sample | αGITR- | Anti | Sample | Positive |
| rabbit | | αPD-L1 | 6xHis-HRP | testing | |
| Fc | | tetrameric | (Thermo- | | |
| fusion | | bispecific | scientific) | | |
| protein | | antibodies | | | |
| | | Commercial | Goat | Standard and | Positive |
| | | mouse anti | anti-mouse | verification | |
| | | human | IgG Fc, HRP | that PD-1 | |
| | | PD-L1 mAb | conjugate | rabbit Fc | |
| | | (Biolegend) | (Thermo- | can be | |
| | | | scientific) | labeled | |
| | Control | No | Anti | Measure | Negative |
| | | | 6xHis-HRP | unspecific | |
| | | | (Thermo- | binding | |
| | | | scientific) | | |
| | | No | Goat | Measure | Negative |
| | | | anti-mouse | unspecific | |
| | | | IgG Fc, HRP | binding | |
| | | | conjugate | | |
| | | | (Thermo- | | |
| | | | scientific) | | |
| CCR4- | Control | Commercial | Anti | Verification | Negative |
| human | | anti mouse | 6xHis-HRP | of specific | |
| Fc | | PD-L1 mAb | (Thermo- | binding of | |
| | | (Biolegend) | scientific) | samples | |
| | | No | Anti | Measure | Negative |
| | | | 6xHis-HRP | unspecific | |
| | | | (Thermo- | binding | |
| | | | scientific) | | |
| | | No | Goat | Measure | Negative |
| | | | anti-mouse | unspecific | |
| | | | IgG Fc, HRP | binding | |
| | | | conjugate | | |

[0243] Cell-Based ELISA of αGITR-αPD-L1 BsAbs on GITR⁻ CF2

[0244] For the cell-based ELISA, the αGITR1-αPD-L1, αGITR10-αPD-L1 and αGITR10-αPD-L1 with CH2 antibodies were tested for retained binding capability on GITR+CF2 cells. In total, four ELISA experiments were set up.

[0245] The first cell-based ELISA the αGITR1-F10 and the αGITR10-F10 tetrameric bispecific antibodies (tBsAbs) were analyzed. For GITR+ CF2 and GITR− CF2 cell (negative control) seeding, 1,000 cells per well were added in 200 μL of 1% DNEM medium and were incubated overnight to allow attachment. On the following day, the cells were fixed with 100 μL of Acetone-Methanol solution (1:1 ratio) and incubated for 20 minutes at RT. The Acetone-Methanol solution was aspirated from the plate and the cells were washed three times with 1× PBS. The general assay procedure and development was performed according to the protocol for ELISA mentioned in chapter 2.6.2. The primary antibodies αGITR1-αPD-L1 and αGITR10-αPD-L1 were tested in variable concentrations. The tBsAbs were serially diluted by one third in 1× incubation buffer; 3.33 mg/mL being the highest concentration and 0.0411 mg/mL the lowest. Several controls were set-up and are listed on the table below (Table 3).

TABLE 3
Experimental Overview on tested samples and controls for
cell based ELISA of αGITR1-αPD-L1 and αGITR10-
αPD-L1 on GITR+CF2 cells (“6xHis” disclosed as SEQ ID NO: 1084)

| | Test- | Primary | Secondary | | Expected |
|---|---|---|---|---|---|
| Antigen | Type | AB | AB | Purpose | signal |
| GIRT⁺CF2 | Sample | αGITR1- | Anti | Sample | Positive |
| | | αPD-L1 | 6xHis-HRP | test | |
| | | | (Thermo- | | |
| | | | scientific) | | |
| | | αGITR10- | Anti | Sample | Positive |
| | | αPD-L1 | 6xHis-HRP | test | |
| | | | (Thermo- | | |
| | | | scientific) | | |
| | | F10- | Anti | Negative | Negative |
| | | αPDL1 | 6xHis-HRP | control | |
| | | | (Thermo- | | |
| | | | scientific) | | |
| | Control | No | Anti | Unspecific | Negative |
| | | | 6xHis-HRP | binding | |
| | | | (Thermo- | | |
| | | | scientific) | | |
| GITR⁻ CF2 | Sample | αGITR1- | Anti | Sample | Negative |
| | | αPD-L1 | 6xHis-HRP | test | |
| | | | (Thermo- | | |
| | | | scientific) | | |
| | | αGITR10- | Anti | Sample | Negative |
| | | αPD-L1 | 6xHis-HRP | test | |
| | | | (Thermo- | | |
| | | | scientific) | | |
| | | F10- | Anti | Sample | Negative |
| | | αPDL1 | 6xHis-HRP | | |
| | | | (Thermo- | | |
| | | | scientific) | | |
| | Control | No | Anti | Unspecific | Negative |
| | | | 6xHis-HRP | binding | |
| | | | (Thermo- | | |
| | | | scientific) | | |

[0246] After evaluating the results of the cell-based ELISA (FIG. 20), the experiment for a second cell-based ELISA was repeated using the same procedure to that described above, except that cells were fixed with 8% paraformaldehyde.

[0247] A third cell based ELISA was performed to compare αGITR10-αPD-L1 tBsAb to the commercial human αGITR mAb. For GITR⁺ CF2 and GITR⁻ CF2 cell (negative control) seeding, 10,000 cells per well were added in 200 μL of 1% DMEM medium and were incubated overnight to allow attachment. On the following day, the cells were fixed with 100 μL of 8% paraformaldehyde and incubated for 20 minutes at RT. The paraformaldehyde solution was aspirated from the plate and the cells were washed three times with 1× PBS. The general assay procedure and development was performed according to the protocol for ELISA mentioned herein. The primary antibodies αGITR10-αPD-L1 and αGITR mAb were tested in variable concentrations. The antibodies were serially diluted (1:2) in 1× incubation buffer; 5 mg/mL being the highest concentration and 0.078 mg/mL the lowest. Several controls were set-up and are listed on the table below (Table 4).

TABLE 4
Experimental Overview on tested samples and controls
for cell based ELISA of αGITR10-αPD-L1 and αGITR
mAb on GITR+CF2 cells

| | Test- | Primary | Secondary | | Expected |
|---|---|---|---|---|---|
| Antigen | Type | AB | AB | Purpose | signal |
| GITR⁺CF2 | Sample | αGITR10- | His-HRP | Sample | Positive |
| | | αPD-L1 | | test | |
| | | Commercial | Goat anti- | Standard | Positive |
| | | GITR mAb | mouse | | |
| | | (Purified | IgG | | |
| | | anti-hu | Fc, HRP | | |
| | | CD357)(Bio- | conjugate | | |
| | | legend) | (Thermo- | | |
| | | | scientific) | | |
| | | F10- | His-HRP | Control | Negative |
| | | αPDL1 | | | |
| | Control | No | His-HRP | Measure | Negative |
| | | | | unspecific | |
| | | | | binding | |
| | | No | Goat anti- | Measure | Negative |
| | | | mouse | unspecific | |
| | | | IgG | binding | |
| | | | Fc, HRP | | |
| | | | conjugate | | |
| | | | (Thermo- | | |
| | | | scientific) | | |
| GITR⁻ CF2 | Sample | αGITR10- | His-HRP | Sample | Negative |
| | | αPD-L1 | | test | |
| | | Commercial | Goat anti- | Standard | Negative |
| | | GITR mAb | mouse | | |
| | | (Purified | IgG | | |
| | | anti-hu | Fc, HRP | | |
| | | CD357)(Bio- | conjugate | | |
| | | legend) | (Thermo- | | |
| | | | scientific) | | |
| | | F10- | His-HRP | Control | Negative |
| | | αPDL1 | | | |
| | Control | No | His-HRP | Measure | Negative |
| | | | | unspecific | |
| | | | | binding | |
| | | No | Goat anti- | Measure | Negative |
| | | | mouse | unspecific | |
| | | | IgG | binding | |
| | | | Fc, HRP | | |
| | | | conjugate | | |
| | | | (Thermo- | | |
| | | | scientific) | | |

[0248] The fourth ELISA was performed to compare αGITR10-αPD-L1 with CH2 tBsAb to the commercial αGITR mAb. The assay procedure was identical to the third ELISA (mentioned above).

[0249] Flow Cytometry Analysis for αGITR1-αPD-L1 & αGITR10-αPD-L1

[0250] The biological activity of αGITR on GITR+CF2 cells was analyzed by means of fluorescence-activated cell sorting FACS analysis. The cells GITR+CF2 cells and GITR−CF2 were grown in a 75 cm² flask (Cellstar) until they reached roughly 80% confluence. They were detached by adding 1:10 diluted Trypsin with 0.25% Trypsin-EDTA (Life Technologies) in PBS and resuspended and then added to 96-well round bottom plate in FACS buffer (PBS, 1% FBS, 2 mM EDTA). In the following step the αGITR1-αPD-L1 and αGITR10-αPD-L1 were added at variable concentrations for 1 hour at 4° C. The highest concentration of antibody tested was at 100 μg/mL and then serially diluted in a two-fold manner until the 0.05 μg/mL dilution. The primary antibodies were detected with His Tag Alexa Fluor 488-conjugated (Biotechne). The secondary antibody was diluted in PBS (Life Technologies) and added to each well for 30 minutes. The cells were then washed three times with PBS buffer and resuspended in FACS buffer. In total 10,000 events were analyzed with FACSCalibur. Results were analyzed by FlowJo 10.1 software. Several controls were performed and are listed in the table below. (Table 5)

TABLE 5
Experimental Overview on control samples for
FACS analysis of αGITR1-αPD-L1α and
GITR10-αPD-L1 on GITR+CF2 cells and GITR−CF2 cells.

| | Test- | Primary | Secondary | | Expected |
|---|---|---|---|---|---|
| Antigen | Type | AB | AB | Purpose | signal |
| GITR⁺CF2 | Control | none | Alexa | Unspecific | negative |
| | | | 488; | binding of | |
| | | | anti- | secondary | |
| | | | His | AB | |
| | | | (APC) | | |
| | | F10- | Alexa | Exclude | negative |
| | | αPD-L1 | 488; | the PD-L1 | |
| | | | anti- | binding to | |
| | | | His | GITR+ | |
| | | | (APC) | CF2 | |
| | | αGITR1 | Anti- | Verify that | positive |
| | | mAb | human | αGITR | |
| | | | IgG Fc | arm can | |
| | | | (FITC) | recognize | |
| | | | | the GITR | |
| | | | | binding | |
| | | | | site | |
| | | none | Anti- | Unspecific | negative |
| | | | human | binding of | |
| | | | IgG Fc | secondary | |
| | | | (FITC) | | |
| | | Commercial | Anti- | Verify that | positive |
| | | mouse | mouse | CF2 cells | |
| | | αGITR | IgG Fc | are | |
| | | IgG | (FITC) | expressing | |
| | | | | GITR | |
| | | none | Anti- | Unspecific | negative |
| | | | mouse | binding of | |
| | | | IgG Fc | secondary | |
| | | | (FITC) | | |
| GITR⁻ CF2 | Control | none | Alexa | Unspecific | negative |
| | | | 488; | binding of | |
| | | | anti-His | secondary | |
| | | | (APC) | | |
| | | F10- | Alexa | Exclude | negative |
| | | αPD-L1 | 488; | the PD-L1 | |
| | | | anti- | binding to | |
| | | | His | GITR+ | |
| | | | (APC) | CF2 | |
| | | αGITR1 | Anti- | Verify that | negative |
| | | IgG | human | αGITR | |
| | | | IgG Fc | arm binds | |
| | | | (FITC) | specif- | |
| | | | | ically | |
| | | | | to GITR+ | |
| | | | | CF2 cells | |

### Example 5: Functional Studies

[0251] ADCC Assay of αGITR-αPDL1 with CH2 on GITR+CF2 Cells

[0252] The antibody-dependent cell-mediated cytotoxicity of αGITR-αPD-L1 with CH2 on GITR+CF2 cells was analyzed using ADCC Reporter Bioassay Complete Kit (WIL2-S) (Promega) and implemented according to the manufacturers protocol. The aim was to test the αGITR10-αPD-L1 with CH2 for ADCC. The assay was performed using ADCC reporter cells (WIL2-S) that have Fcy receptors and the response element-driven luciferase gene.

[0253] The cells GITR⁺CF2 cells and GITR⁻CF2 were grown in a 75 cm² flask (Cellstar) until they reached roughly 80% confluence. They were detached by adding 1:10 diluted 0.25% Trypsin-EDTA (Life Technologies) in PBS and tested for viability. The GITR⁺CF2 cells were used as target cells and plated in 96-well cell flat bottom microplate (PerkinElmer) at a density of 2×10⁴ cells per well diluted in RPMI 1640 medium (Life Technologies®; serum free). The αGITR10-αPD-L1 (with CH2) and the controls (αGITR10-IgG (positive control) and GITR10-PD-L1 and F10-PDL1 (negative control) were serially diluted in ADCC assay medium. The four antibodies were added in a concentration-dependent manner, starting at 20 mg/mL (highest concentration), followed by 2 mg/mL, 0.2 mg/mL and 0.02 mg/mL, respectively (1:10 serial dilution) and incubated for 5 minutes at RT. Following incubation, the effector cells WIL2-S were suspended in ADCC assay medium and added to the target cell/antibody mixture at 10×10⁶ cells per well. The ratio of effector cells to target cells was set up as 5:1 (E/T). After approximately a 6 hour incubation at 37° C. (5% CO₂), an equal volume of the Bio-Gio Luciferase assay reagent (Promega) was added to the wells and incubated (RT, 10 min). The luminescence of the cells was measured using Polarstar Omega. Assays were performed in triplicate. All data were plotted using Excel.

[0254] CDC Assay of αGITR-α-PDL1 with CH2 on GITR⁺CF2 Cells

[0255] For the testing of complement-dependent cytotoxicity (CDC) of the αGITR10-α-PDL1 with CH2 tBsAb, baby rabbit complement (Cedarlane Laboratories) was used in the CellTox™ Green Cytotoxicity assay (Promega) using CellTox Green Dye (Promega) that binds DNA in comprised cells. The fluorescent signal produced by the dye binding to the dead-cell DNA is proportional to cytotoxicity. The assay was performed according the manufacturers protocol. The experimental procedure and set-up for the testing of complement-dependent cytotoxicity was similar to the CDC test mentioned above, with exception of the assay development and analysis which was performed with the CellTox™ Green Cytotoxicity assay (Promega). The antibodies tested for complement-dependent cytotoxicity were the αGITR10-αPDL1 and the αGITR10-α-PDL1 with CH2 tetrameric bispecific antibodies (tBsAbs). The αGITR mAb was used for positive control and the F10-αPD-L1 was used as negative control.

[0256] After approximately a 4 hour incubation at 37° C. (5% CO₂) an equal volume of CellTox Green Dye assay reagent (Promega) was added to the wells and incubated (RT, 10 min). The fluorescence was measured using Polarstar Omega. Assays were performed in triplicate. All data were plotted using Excel.

### Example 6: Isolation and Characterization of the αGITR-αPD-L1 BsAbs

[0257] Generation of Expression Vector

[0258] In total six vectors (αGITR-αPD-L1) were constructed to produce the desired tBsAbs and additional three vectors for the production of control Abs (αGITR1-F10, αGITR10-F10 and F10-αPD-L1). The expression vector was generated according to the cloning strategy described above.

[0259] The recipient expression vector pcDNA 3.4 and all donor vectors (six V_{H}GITR-linker-V_{L}GITR and inserts and one V_{H}F10-V_{L}F10 insert) were digested with SfiI and NotI restriction enzymes and the fragments were separated on a 1% agarose gel, stained with ethidium-bromide. The SfiI and NotI digestion patterns of the seven digestions were in agreement with the theoretically calculated values. The digested recipient vector pcDNA 3.4 vector comprises 7500 bp and can be detected at the correct level (lane1; 8000 bp) of the ladder. The smaller fragment in lane 1 displayed between 500 and a 1000 bp and corresponds to V_{H}^{X}-linker-V_{L}^{X} of a previously-used scFv. The GITR inserts (lanes 2-6) and the F10 insert (lane 7) were clustered between 500 and 1000 bp. The larger bands seen at the level of 8000 bp (lanes 2-7) represent the corresponding descendent vectors.

[0260] Two additional control plasmids (2) and (3) were constructed. The recipient expression vectors pcDNA3.4 encoding the αGITR1-αPDL1 and αGITR10-αPDL1 scFvs were digested with BsiWI and BamHI Res to replace the V_{H}PD-L1-linker-V_{L}PD-L1 fragment with V_{H}F10-linker-V_{L}F10 fragment. To isolate the V_{H}F10-linker-V_{L}F10 fragment from the pcDNA3.1 donor vector, a forward and a reverse primer (No.1 and No.2) were designed, containing the BsiWI and BamHI restriction site. After isolating the cDNA using PCR, it was digested with BsiWI and BamHI RE. The gel analyses of all 3 digestions were consistent with the theoretical number. As anticipated the PCR of F10 fragment only shows one band at the correct position relative to the ladder. The two digested recipient vectors (containing V_{H}GITR1-V_{L}GITR1 or V_{H}GITR10-V_{L}GITR10, respectively) are approximately 8000 bp in size and match the theoretical size of the vector (7500 bp).

[0261] All digested fragments were extracted and purified form the agarose gel and the respective ligation reactions were performed. The yielded plasmids were successfully constructed and confirmed by sequencing (Genewiz).

[0262] Expression of GITR-PDL1 bispecific Antibodies and αGITR-IgG The αGITR-αPD-L1 proteins were expressed in 293F HEK cells and isolated via Ni-NTA purification. The αGITR IgG protein was expressed in HEK 293F cells and isolated via Protein A purification. The yields measured by NanoDrop spectrophotometer are listed in table 6.

TABLE 6
Antibody yield of 293F HEK expression

| | Yield per | | per |
|---|---|---|---|
| | 300 mL | | 300 mL |
| | cell culture | | cell culture |
| Antibody | [mg] | Antibody | [mg] |
| αGITR1-αPD-L1 | 3.3 | αGITR17-αPD-L1 | 2.5 |
| αGITR10-αPD-L1 | 5.5 | F10-αPD-L1 | 1.1 |
| αGITR11-αPD-L1 | 2.8 | αGITR1-F10 | 1.4 |
| αGITR14-αPD-L1 | 1.7 | αGITR10-F10 | 1.5 |
| αGITR15-αPD-L1 | 2.7 | αGITR IgG | 2.9 |

[0263] SDS-PAGE Analysis

[0264] The purity of the tBsAbs αGITR1-αPDL1, αGITR10-αPDL1, αGITR11-αPDL1, αGITR14-αPDL1, αGITR15-αPDL1, αGITR17-αPDL1 and F10-αPD-L1 were analyzed by SDS-PAGE. Between 3 μg-5 μg of protein sample was loaded on the gel, separated electrophoretically and stained with Coomassie blue.

[0265] Notable, under non-reducing conditions, there are two bands that particularly draw attention. The upper band lies within the 115 kDa and 140 kDa range. The quantitative predominance of this band in each of the protein profiles and the proximity of its apparent molecular size to that of the αGITR-αPD-L1 tetrameric bispecific antibodies (tBsAbs) (130 kDa) indicate successful antibody production. The lower band lies between 70 and 80 kDa and thus, may account for a substantial amount of monomeric tandem scFv (65 kDa). Apart from this, some weaker bands above 140 kDa are observable, suggesting the formation of aggregates.

[0266] Under reducing conditions, only one band can be seen between 70 and 80 kDa, which suggests the disulfide bond reduction of tBsAbs into tandem scFv (65 kDa). Deviating molecular weights between apparent and theoretical calculated values can stem from post-translational modifications (such as glycosylation and phosphorylation) as well as protein conformation as it is running through the SDS PAGE. Differences amounts loaded onto the gel can account for differences in the intensity of the bands between the αGITR-αPD-L1 tBsAbs.

[0267] Further, the purity of the αGITR-IgG was also analyzed by SDS-PAGE. Under non-reducing conditions, the analysis exhibited one band with an apparent molecular weight of 140 kDa and is approximate equal to the theoretical calculated molecular weight of an αGITR IgG (150 kDa). The reduced SDS analysis revealed two bands, which proposes the successful disulfide bond reduction of the αGITR IgG resulting in heavy chain (50 kDa) and light chain (25 kDa).

[0268] Direct ELISA of αGITR-αPD-L1 BsAbs on Passively Adsorbed PD-L1 Antigen

[0269] Direct ELISA of the αGITR-αPD-L1 BsAbs was performed to characterize their reactivity to the PD-L1 antigen. As shown in FIG. 19, reactivity to PD-L1 antigen could be observed in all αGITR-αPD-L1 tBsAbs, while no unspecific stickiness to CCR4 was seen (not shown). The readout signal was very similar for all αGITR-αPD-L1 tBsAbs at all concentrations. Highest ELISA signals were measured at highest concentrations. In addition the absorbance value of αGITR-αPD-L1 tBsAbs binding was comparable to that for the commercial αPD-L1 mAb and the intensity signal decreased with lower concentrations. The ELISA does not show saturation at the higher concentration and has very weak signal at concentrations below 0.01 mg/mL.

[0270] Cell-Based ELISA of αGITR-αPD-L1 tBsAbs on GITR+ CF2

[0271] In previous studies of αGITR IgGs, αGITR1 IgG and αGITR10 IgG were proven to have the best characteristics, which is why the project here was narrowed down the following experiments to αGITR10-αPD-L1 and αGITR1-αPD-L1 tBsAbs. The cell based enzyme-linked immunosorbent assay (ELISA) was used to test the αGITR1-αPD-L1, αGITR10-αPD-L1 at different concentrations against GITR+ CF2 cells to analyze their reactivity. As shown in FIG. 20, reactivity to GITR+ CF2 could be observed for αGITR1-αPD-L1 and αGITR10-αPD-L1 antibodies. The OD value of αGITR1-αPD-L1 and αGITR10-αPD-L1 depend on their respective concentrations. Consistent with the expectations, the stronger signal was measured at the higher concentration; then gradually diminished as the concentration decreased.

[0272] The signal intensity of αGITR10-αPD-L1 is superior to that by αGITR1-αPD-L1 at all concentrations. Surprisingly, the negative control F10-αPD-L1 antibody not only shows absorbance but also seems to behave in a concentration-dependent manner. For αGITR1-αPD-L1 and F10-αPD-L1, no readout signal was detected below the threshold of 0.1235 mg/mL. Overall, the standard deviations of the mean were exceptionally high.

[0273] Due to the surprising results of the previous ELISA (see FIG. 20), the experiment was repeated. The set-up remained identical, with the exception that the GITR+ CF2 cells were fixed with 8% paraformaldehyde instead of acetone-methanol solution. Results of this second approach revealed similar signal readout observations of αGITR1-αPD-L1 and αGITR10-αPD-L1 antibodies, but with slightly higher absorption values (See, FIG. 21). However, the F10-αPD-L1 antibody continues to display signal activity and its absorbance is still dependent on the concentration used. The tBsAbs showed no binding when incubated with GITR-CF2 cells. See, FIG. 32.

[0274] A third cell-based ELISA was performed to compare αGITR10-αPD-L1 antibody to a commercial αGITR IgG. Reactivity of both antibodies was observed in GITR+CF2 cells (FIG. 22) but not GITR-CF2 cells (See, FIG. 33). Again, the results of the αGITR10- αPD-L1 matched previous recorded data. The signal intensity of the αGITR mAb is superior to that by αGITR10-αPD-L1 at all concentrations. Surprisingly, at higher concentrations, no saturation of the signal readout could be observed. The control antibody F10-αPD-L1 (neg. control) showed concentration-dependent signal activity for GITR+CF2 cells but not for CF2 cells (without GITR+ expression). See, FIG. 33.

[0275] Flow Cytometry Analysis of αGITR-αPD-L1 BsAbs on GITR− Cells

[0276] Flow cytometry analysis assesses the binding of αGITR1-αPD-L1 and αGITR10-αPD-L1 antibodies to GITR+CF2 cells (FIGS. 23 and 24). The results show, that both antibodies (co-stained with an APC-labeled His-Tag Alexa Fluor 488) can bind specifically the GITR+CF2. Further, the tBsAbs had no reactivity against GITR−CF2 (FIG. 34) Note that some non-specific binding is caused by the secondary antibodies as shown in the controls (FIG. 34). The comparison of the two antibodies to each other shows that they display similar binding under the identical conditions. Therefore, only the αGITR10-αPD-L1 tBsAb was selected for further characterization. The standard measurement of the αGITR1 IgG and αGITR10 IgG revealed similar binding properties when compared to the tBsAbs.

### Example 7: Isolation and Characterization of αGITR-αPD-L1 with CH2 bsAb

[0277] Generation of Bacterial Expression Vector

[0278] In previous studies, the αGITR10 mAb was proven to exhibit the best characteristics, which is why αGITR10-αPD-L1 was chosen as the expression vector for the engineering of the new construct containing a CH2 domain. The vector was generated according to the cloning strategy described above, resulting in the gene order V_{H}GITR-linker-V_{L}GITR-linker-hinge-CH2-linker-V_{H}PD-L1-linker-V_{L}PD-L1.

[0279] Site-directed mutagenesis enabled introduction of a HindIII restriction site into the recipient pcDNA 3.4 vector between the IgG1 Hinge region and the linker (GGGGS)₆ (SEQ ID NO: 1909). After transformation into E. coli strain XL10-Gold® Ultracompetent cells, 16 clones were picked then underwent DNA purification. A restriction enzyme digestion analysis using HindIII and BamHI restriction enzymes, displayed on a 1% agarose gel, tested for the correct introduction of HindIII restriction site (See FIG. 25). Of the 16 clones, only clone No. 10 showed two bands. The size of the smaller band clustered between 500 and 1000 bp, corresponds to the theoretical size of HindIII and BamHI digestion (800 bp). Since HindIII and BamHI represent unique restriction sites in the plasmid, this result indicated a successful introduction of HindIII into the DNA of cells in clone No. 10.

[0280] An additional gel analysis of clone No. 10 was undertaken to compare it to the original GITR10-PDL1 (that does not contain the HindIII restriction site); see FIG. 26. Clone No. 10 (GITR10-PDL1 with HindIII) and GITR10-PDL1 (without HindIII) each individually underwent three digestions. The first digestion was performed with only HindIII restriction enzyme, a second one with only NotI restriction enzyme and a third digestion with both HindIII and NotI restriction enzymes. The digestions of clone No.10 with a single enzyme resulted in open-circular conformation and were clustered around 8000 bp. In contrast, the double digestion of clone No. 10 with HindIII and NotI restriction enzymes resulted in two bands. The lower band is clustered below 500 bp and corresponds to the theoretical calculated value for the HindIII/NotI digestion fragment (117 bp). The αGITR10-αPD-L1 plasmid does not contain a HindIII restriction site, which is why the gel analysis of HindIII single digestion revealed, as anticipated, the supercoiled plasmid DNA. These results strongly suggest the correct introduction of the HindIII restriction site.

[0281] The sequencing results (Genewiz) of clone No. 10 confirmed the correct introduction of HindIII between the hinge and the linker domain. However, deletion of five linker-repeats of the total six (GGGGS (SEQ ID NO: 1484)) repeats occurred during site directed mutagenesis. The new construct consequently exhibited only one repeat of the linker sequence rather than six linker repeats. Nevertheless, it was decided to continue plasmid construction with this new created plasmid containing a hinge region followed by one single linker repeat (GGGGS (SEQ ID NO: 1484)).

[0282] Two primers (forward and reverse) were designed to isolate the CH2 domain from an IgG1 plasmid. Each primer included a HindIII restriction site. The recipient vector GITR10-PDL1 (containing the HindIII site) and the CH2 fragment were single digested with the HindIII restriction enzyme and analyzed in a 1% agarose gel (FIG. 27). Both digestions resulted in a fragment size that matches the theoretical calculated values: 7.5 bp for the recipient vector GITR10-PDL1 with HindIII and 350 bp for the CH2 fragment.

[0283] Therefore, the pcDNA 3.4 expression vector αGITR10-αPD-L1 with CH2 was successfully constructed and confirmed by sequencing (Genewiz).

[0284] SDS-PAGE Analysis

[0285] The αGITR10-αPD-L1 with CH2 protein was expressed in 293T HEK cells and isolated via Ni-NTA purification. A total of 100 mL culture media resulted in 200 ng protein yield (NanoDrop analysis). The purity of the GITR10-PDL1 with CH2 tBsAb was analyzed by SDS-PAGE (FIG. 28). In total 3 μg of protein sample was loaded on the gel, separated electrophoretically and stained with Coomassie blue. Notable, under non-reducing conditions there are two bands that particularly draw attention. The upper band lies slightly above 140 kDa. The quantitative predominance of this band and the proximity of its apparent molecular size to that of the αGITR10-αPD-L1 with CH2 tBsAb (150 kDa) propose the successful antibody production. The lower band has an apparent molecular weight of 80 kDa and thus, may account for a substantial amount of tandem scFv containing the CH2 (75 kDa) that did not dimerize. Under reducing conditions only one band can be seen at 80 kDa, which suggests that the disulfide bond reduction of the tBsAb into tandem scFv (75 kDa).

[0286] Cell-Based ELISA of αGITR-αPD-L1 with CH2 Tetrameric Bispecific Antibody (tBsAb) on GITR⁺ CF2

[0287] The cell-based enzyme-linked immunosorbent assay (ELISA) was performed to test the αGITR10-αPD-L1 with CH2 at different concentrations against GITR⁺ CF2 to analyze their signal intensity.

[0288] As shown in FIG. 29, reactivity to GITR⁺ CF2 could be observed in αGITR10-αPD-L1 with CH2 antibodies, while no unspecific stickiness to GITR⁻ CF2 was noted; see FIG. 35. The OD value of αGITR10-αPD-L1 with CH2 depends on their respective concentrations. Consistent with the expectations, the strongest signal was measured at the highest concentration; then gradually diminished as the concentration decreased. The signal intensity of the αGITR IgG is superior to that of αGITR10-αPD-L1 with CH2 at most concentrations. Surprisingly, at higher concentrations, no saturation of the signal readout could be observed. The control antibody (F10-αPD-L1) was tested at highest concentration (5 μg/mL) and had, as previously seen (FIGS. 22 and 21), some reactivity.

### Example 8: Functional Studies of αGITR-αPD-L1 with CH2 BsAb

[0289] In an initial attempt to establish functional data, complement-dependent cytotoxicity (CDC) and antibody dependent cellular cytotoxicity (ADCC) was tested for the αGITR-αPD-L1 with CH2 BsAbs. However, the results were inconclusive.

[0290] ADCC Reporter Assay of αGITR-αPD-L1 with CH2 BsAb on GITR+ CF2

[0291] The αGITR10-αPD-L1 with CH2 BsAb was tested for ADCC activity using GITR+CF2 cells (target cells) and the WIL2-S (effector cells) (E/T=5:1). Antibody biological activity in ADCC was quantified through the luciferase produced as a result of NFAT pathway activation and its activity in the effector cell was quantified with luminescence readout. In the ADCC analysis, the αGITR10-αPD-L1 and αGITR10-αPD-L1 with CH2 displayed surprising results (FIG. 30). The negative control F10-αPD-L1 displayed similar signal intensity for ADCC compared to solely target and effector cells and is unbiased to variable concentrations. The positive control αGITR IgG on the other hand, exhibited, as expected, increasing values with higher concentrations. Surprisingly, for the αGITR10-αPD-L1 and αGITR10-αPD-L1 with CH2 the ADCC signal intensity decreased with higher concentrations and was substantially lower than the signal of solely target and effector cells at 20 μg/mL tBsAbs.

[0292] The ADCC activity ofaaGITR10-αPD-L1 with CH2 and was measures at variable concentrations. All antibodies were serially diluted (1:2), starting the highest concentration at 20 mg/mL until 0.02 mg/mL and tested against 20,000 GITR+CF2 cells per well. The ratio of effector cells (GITR+CF2) to target cells (Wils-2) was 5:1. The αGITR IgG represents the positive control and F10-αPD-L1 the negative control. The vertical axis represents the raw value of luciferase activity in the effector cell quantified with luminescence readout. Each sample was run in triplicates at every concentration; the mean standard deviation is indicated in brackets. The background of GITR+CF2 cells in RPMI medium was subtracted from the obtained values.

[0293] CDC Analysis of αGITR10-αPD-L1 BsAb with CH2 on GITR+CF2 Cells

[0294] The αGITR10-αPD-L1 with CH2 antibody was tested for complement-dependent cytotoxicity against CF2 cells expressing the GITR by measuring the amount of fluorescent CellTox Green bound to comprised DNA. The percentage of lysis is calculated as the ratio of the intensity of the signal obtained from the sample, to the intensity of the signal from fully lysed GITR+ CF2 cells (FIG. 31).

[0295] The negative control F10-αPD-L1 BsAb displayed similar percentages of cytotoxicity as the positive control αGITR IgG. αGITR10-αPD-L1 with CH2 exhibited similar cytotoxicity levels at all concentrations ranging between 65% and 70% and did not appear to be concentration dependent. Neither of the measured antibodies had a substantial higher percentage of cellular cytotoxicity. These findings largely contradict the expected outcome; a possible reason for these incongruities is a potentially low viability of the used GITR+CF2 cells.

### Other Embodiments

[0296] While the invention has been described in conjunction with the detailed description thereof, the foregoing description is intended to illustrate and not limit the scope of the invention, which is defined by the scope of the appended claims. Other aspects, advantages, and modifications are within the scope of the following claims.

We claim:

1. A tetravalent antibody molecule, wherein the tetravalent antibody is a dimer of a bispecific scFv fragment comprising a first binding site for a first antigen, a second binding site for a second antigen, wherein the two binding sites are joined together via a linker domain.

2. The tetravalent antibody molecule of claim 1, wherein the scFv fragment is a tandem scFv.

3. The tetravalent antibody molecule of claim 1, wherein the linker domain comprises an immunoglobulin hinge region amino acid sequence.

4. The tetravalent antibody molecule of claim 3, wherein the hinge region is an IgG1, IgG2, an IgG3, or an IgG4 hinge region.

5. The tetravalent antibody molecule of claim 3 or claim 4, wherein the immunoglobulin hinge region amino acid sequence is flanked by a flexible linker amino acid sequence.

6. The tetravalent antibody molecule of claim 5, wherein the flexible linker amino acid sequence comprises the amino acid sequence (GGGS)_{X1-6} (SEQ ID NO: 1906) (GGGGS)_{X1-6} (SEQ ID NO: 1907), or GSAGSAAGSGEF (SEQ ID NO: 1908).

7. The tetravalent antibody molecule of claim 1 or claim 2, wherein the linker domain comprises at least a portion of an immunoglobulin Fc domain.

8. The tetravalent antibody molecule of claim 7, wherein the Fc domain is an IgG1, an IgG2, an IgG3, or an IgG4 Fc domain.

9. The tetravalent antibody molecule of claim 7 or claim 8, wherein the at least a portion of an immunoglobulin Fc domain is a CH2 domain.

10. The tetravalent antibody molecule of any one of claims 7 to 9, wherein the Fc domain is linked to the C-terminus of an immunoglobulin hinge region amino acid sequence.

11. The tetravalent antibody molecule of claim 10, wherein the hinge region is an IgG1, an IgG2, an IgG3, or an IgG4 hinge region.

12. The tetravalent antibody molecule of claim 9 or claim 10, wherein the linker domain comprises a flexible linker amino acid sequence at one terminus or at both termini.

13. The tetravalent antibody molecule of claim 12, wherein each flexible linker amino acid sequence independently comprises the amino acid sequence (GGGS)_{X1-6} (SEQ ID NO: 1906) (GGGGS)_{X1-6} (SEQ ID NO: 1907) or GSAGSAAGSGEF (SEQ ID NO: 1908).

14. A nucleic acid construct comprising nucleic acid molecules encoding:
a light chain variable region and a heavy chain variable region of an antibody that can specifically bind to a first antigen;
a light chain variable region and a heavy chain variable region of an antibody that can specifically bind to a second antigen; and
a linker domain.

15. The nucleic acid construct of claim 14, wherein the linker domain comprises an immunoglobulin hinge region amino acid sequence.

16. The nucleic acid construct of claim 15, wherein the hinge region is an IgG1, an IgG2, an IgG3, or an IgG4 hinge region.

17. The nucleic acid construct of any one of claims 14 to 16, wherein the linker domain comprises at least a portion of an immunoglobulin Fc domain.

18. The nucleic acid construct of claim 17, wherein the Fc domain is an IgG1, an IgG2, an IgG3, or an IgG4 Fc domain.

19. The nucleic acid construct of claim 17 or claim 18, wherein the at least a portion of an immunoglobulin Fc domain is a CH2 domain.

20. The nucleic acid construct of any one of claims 17 to 19, wherein the Fc domain is linked to the C-terminus of the hinge region.

21. The nucleic acid construct of any one of claims 14 to 20, wherein the linker domain comprises a flexible linker amino acid sequence at one terminus or at both termini.

22. The nucleic acid construct of claim 21, wherein each flexible linker amino acid sequence independently comprises the amino acid sequence (GGGS)_{X1-6} (SEQ ID NO: 1906) (GGGGS)_{X1-6} (SEQ ID NO: 1907) or GSAGSAAGSGEF (SEQ ID NO: 1908).

23. A vector comprising the nucleic acid construct of any one of claims 14 to 22.

24. A host cell comprising the vector of claim 23.

25. The host cell of claim 24, wherein the cell is a T-cell, a B-cell, a follicular T-cell, or an NK-cell.

26. A chimeric antigen receptor (CAR) comprising an intracellular signaling domain, a transmembrane domain and an extracellular domain comprising the tetravalent antibody molecule of claim 1.

27. The CAR of claim 26, wherein the transmembrane domain further comprises a stalk region positioned between the extracellular domain and the transmembrane domain.

28. The CAR or claim 26, wherein the transmembrane domain comprises CD28.

29. The CAR of claim 26, further comprising one or more additional costimulatory molecules positioned between the transmembrane domain and the intracellular signaling domain.

30. The CAR of claim 29, wherein the costimulatory molecules is CD28, 4-1BB, ICOS, or OX40.

31. The CAR of claim 26, wherein the intracellular signaling domain comprises a CD3 zeta chain.

32. A genetically engineered cell which expresses and bears on the cell surface membrane the chimeric antigen receptor of any one of claims 26-31.

33. The genetically engineered cell of claim 32, wherein the cell is a T-cell or an NK cell.

34. The genetically engineered cell of claim 33, wherein the T cell is CD4+ or CD8+.

35. The genetically engineered cell of claim 34, which comprises a mixed population of CD4+ and CD8 cells+.

36. A method for treating a disease or disorder comprising administering the tetravalent antibody molecule of any one of claims 1 to 12.

37. The method of claim 36, wherein the disease or disorder is a CNS-related disease or disorder.

38. The method of claim 37, wherein the CNS-related disease or disorder is a CNS cancer.

39. The method of claim 38, wherein the CNS cancer is a Glioblastoma (GBM).

40. The method of claim 37, wherein the CNS-related disease or disorder is a neurodegenerative disease.

41. The method of claim 40, wherein the neurodegenerative disease is Amyotrophic Lateral Sclerosis, Parkinson's Disease, Alzheimer's Disease, or Huntington's Disease.

42. The method of any one of claims 37 to 42, wherein the tetravalent antibody molecule recognizes and/or is bound by a CNS transport receptor.

43. The method of claim 42, wherein the CNS transport receptor is a transferrin receptor (TfR), VCAM-1, CD98hc, or an insulin receptor.

44. The method of any one of claims 37 to 42, wherein the tetravalent antibody molecule augments transport across the blood brain barrier.

The application's sequence listing, which the Patent Office published only in electronic form, follows.

SEQUENCE LISTING (1915 sequences)

SEQ ID NO: 1 - protein, 8 aa, Artificial Sequence
  Description of Artificial Sequence: Synthetic peptide
GGPFSSYA

SEQ ID NO: 2 - protein, 8 aa, Artificial Sequence
  Description of Artificial Sequence: Synthetic peptide
GGIFSSYA

SEQ ID NO: 3 - protein, 8 aa, Artificial Sequence
  Description of Artificial Sequence: Synthetic peptide
GGTFSSYA

SEQ ID NO: 4 - protein, 8 aa, Artificial Sequence
  Description of Artificial Sequence: Synthetic peptide
GVTFSSYA

SEQ ID NO: 5 - protein, 8 aa, Artificial Sequence
  Description of Artificial Sequence: Synthetic peptide
GVTFSSYA

SEQ ID NO: 6 - protein, 8 aa, Artificial Sequence
  Description of Artificial Sequence: Synthetic peptide
GVTFSSYA

SEQ ID NO: 7 - protein, 8 aa, Artificial Sequence
  Description of Artificial Sequence: Synthetic peptide
GGTFSSYA

SEQ ID NO: 8 - protein, 8 aa, Artificial Sequence
  Description of Artificial Sequence: Synthetic peptide
GGTFSSYA

SEQ ID NO: 9 - protein, 8 aa, Artificial Sequence
  Description of Artificial Sequence: Synthetic peptide
GGTFSSYA

SEQ ID NO: 10 - protein, 8 aa, Artificial Sequence
  Description of Artificial Sequence: Synthetic peptide
GVTFSSYA

SEQ ID NO: 11 - protein, 8 aa, Artificial Sequence
  Description of Artificial Sequence: Synthetic peptide
GVTFRSYA

SEQ ID NO: 12 - protein, 8 aa, Artificial Sequence
  Description of Artificial Sequence: Synthetic peptide
GGTFSSYA

SEQ ID NO: 13 - protein, 8 aa, Artificial Sequence
  Description of Artificial Sequence: Synthetic peptide
GGPFSSYA

SEQ ID NO: 14 - protein, 8 aa, Artificial Sequence
  Description of Artificial Sequence: Synthetic peptide
GGTFSSYA

SEQ ID NO: 15 - protein, 8 aa, Artificial Sequence
  Description of Artificial Sequence: Synthetic peptide
GGTFSSYA

SEQ ID NO: 16 - protein, 8 aa, Artificial Sequence
  Description of Artificial Sequence: Synthetic peptide
GVTFSSYA

SEQ ID NO: 17 - protein, 8 aa, Artificial Sequence
  Description of Artificial Sequence: Synthetic peptide
GVTFSSYA

SEQ ID NO: 18 - protein, 8 aa, Artificial Sequence
  Description of Artificial Sequence: Synthetic peptide
GVTFSSYA

SEQ ID NO: 19 - protein, 8 aa, Artificial Sequence
  Description of Artificial Sequence: Synthetic peptide
GGPFSSYA

SEQ ID NO: 20 - protein, 8 aa, Artificial Sequence
  Description of Artificial Sequence: Synthetic peptide
GGPFSSYA

SEQ ID NO: 21 - protein, 8 aa, Artificial Sequence
  Description of Artificial Sequence: Synthetic peptide
GVTFSSYA

SEQ ID NO: 22 - protein, 8 aa, Artificial Sequence
  Description of Artificial Sequence: Synthetic peptide
GGTFSSYA

SEQ ID NO: 23 - protein, 8 aa, Artificial Sequence
  Description of Artificial Sequence: Synthetic peptide
GGTFSSYA

SEQ ID NO: 24 - protein, 8 aa, Artificial Sequence
  Description of Artificial Sequence: Synthetic peptide
GVTFSSYA

SEQ ID NO: 25 - protein, 8 aa, Artificial Sequence
  Description of Artificial Sequence: Synthetic peptide
GVTFSSYA

SEQ ID NO: 26 - protein, 8 aa, Artificial Sequence
  Description of Artificial Sequence: Synthetic peptide
GVTFSSYA

SEQ ID NO: 27 - protein, 8 aa, Artificial Sequence
  Description of Artificial Sequence: Synthetic peptide
GGTFSSYA

SEQ ID NO: 28 - protein, 8 aa, Artificial Sequence
  Description of Artificial Sequence: Synthetic peptide
GGIFSSYA

SEQ ID NO: 29 - protein, 8 aa, Artificial Sequence
  Description of Artificial Sequence: Synthetic peptide
GGTFSSYA

SEQ ID NO: 30 - protein, 8 aa, Artificial Sequence
  Description of Artificial Sequence: Synthetic peptide
GGTFSSYA

SEQ ID NO: 31 - protein, 8 aa, Artificial Sequence
  Description of Artificial Sequence: Synthetic peptide
GGTFSSYA

SEQ ID NO: 32 - protein, 8 aa, Artificial Sequence
  Description of Artificial Sequence: Synthetic peptide
GGTFSSYA

SEQ ID NO: 33 - protein, 8 aa, Artificial Sequence
  Description of Artificial Sequence: Synthetic peptide
GGTFSSYA

SEQ ID NO: 34 - protein, 8 aa, Artificial Sequence
  Description of Artificial Sequence: Synthetic peptide
GVTFRSYA

SEQ ID NO: 35 - protein, 8 aa, Artificial Sequence
  Description of Artificial Sequence: Synthetic peptide
GGTFSSYA

SEQ ID NO: 36 - protein, 8 aa, Artificial Sequence
  Description of Artificial Sequence: Synthetic peptide
GVTFSSYA

SEQ ID NO: 37 - protein, 8 aa, Artificial Sequence
  Description of Artificial Sequence: Synthetic peptide
ISPMFGTA

SEQ ID NO: 38 - protein, 8 aa, Artificial Sequence
  Description of Artificial Sequence: Synthetic peptide
ISPIFGTA

SEQ ID NO: 39 - protein, 8 aa, Artificial Sequence
  Description of Artificial Sequence: Synthetic peptide
ISPIFGTA

SEQ ID NO: 40 - protein, 8 aa, Artificial Sequence
  Description of Artificial Sequence: Synthetic peptide
ISPIFGTA

SEQ ID NO: 41 - protein, 8 aa, Artificial Sequence
  Description of Artificial Sequence: Synthetic peptide
IMPMFGTA

SEQ ID NO: 42 - protein, 8 aa, Artificial Sequence
  Description of Artificial Sequence: Synthetic peptide
ISPLFGTA

SEQ ID NO: 43 - protein, 8 aa, Artificial Sequence
  Description of Artificial Sequence: Synthetic peptide
ISPIFGTA

SEQ ID NO: 44 - protein, 8 aa, Artificial Sequence
  Description of Artificial Sequence: Synthetic peptide
ISPIFGTA

SEQ ID NO: 45 - protein, 8 aa, Artificial Sequence
  Description of Artificial Sequence: Synthetic peptide
ISPMFGTA

SEQ ID NO: 46 - protein, 8 aa, Artificial Sequence
  Description of Artificial Sequence: Synthetic peptide
ISPIFGTA

SEQ ID NO: 47 - protein, 8 aa, Artificial Sequence
  Description of Artificial Sequence: Synthetic peptide
ISGIFGTA

SEQ ID NO: 48 - protein, 8 aa, Artificial Sequence
  Description of Artificial Sequence: Synthetic peptide
ISPMFGTA

SEQ ID NO: 49 - protein, 8 aa, Artificial Sequence
  Description of Artificial Sequence: Synthetic peptide
ISGIFGTA

SEQ ID NO: 50 - protein, 8 aa, Artificial Sequence
  Description of Artificial Sequence: Synthetic peptide
ISPIFGTA

SEQ ID NO: 51 - protein, 8 aa, Artificial Sequence
  Description of Artificial Sequence: Synthetic peptide
ISPIFGTA

SEQ ID NO: 52 - protein, 8 aa, Artificial Sequence
  Description of Artificial Sequence: Synthetic peptide
ISPMFGTA

SEQ ID NO: 53 - protein, 8 aa, Artificial Sequence
  Description of Artificial Sequence: Synthetic peptide
ITPMFGTA

SEQ ID NO: 54 - protein, 8 aa, Artificial Sequence
  Description of Artificial Sequence: Synthetic peptide
ISPLFGTA

SEQ ID NO: 55 - protein, 8 aa, Artificial Sequence
  Description of Artificial Sequence: Synthetic peptide
ISPMFGTA

SEQ ID NO: 56 - protein, 8 aa, Artificial Sequence
  Description of Artificial Sequence: Synthetic peptide
ISPLFGTA

SEQ ID NO: 57 - protein, 8 aa, Artificial Sequence
  Description of Artificial Sequence: Synthetic peptide
ISPMFGTA

SEQ ID NO: 58 - protein, 8 aa, Artificial Sequence
  Description of Artificial Sequence: Synthetic peptide
ISPLFGTA

SEQ ID NO: 59 - protein, 8 aa, Artificial Sequence
  Description of Artificial Sequence: Synthetic peptide
ISPIFGTA

SEQ ID NO: 60 - protein, 8 aa, Artificial Sequence
  Description of Artificial Sequence: Synthetic peptide
ISPIFGTA

SEQ ID NO: 61 - protein, 8 aa, Artificial Sequence
  Description of Artificial Sequence: Synthetic peptide
ISPLFGTA

SEQ ID NO: 62 - protein, 8 aa, Artificial Sequence
  Description of Artificial Sequence: Synthetic peptide
ISPIFGTA

SEQ ID NO: 63 - protein, 8 aa, Artificial Sequence
  Description of Artificial Sequence: Synthetic peptide
ISPMFGTA

SEQ ID NO: 64 - protein, 8 aa, Artificial Sequence
  Description of Artificial Sequence: Synthetic peptide
ISPIFGTA

SEQ ID NO: 65 - protein, 8 aa, Artificial Sequence
  Description of Artificial Sequence: Synthetic peptide
ITPIFGTA

SEQ ID NO: 66 - protein, 8 aa, Artificial Sequence
  Description of Artificial Sequence: Synthetic peptide
ISPIFGTA

SEQ ID NO: 67 - protein, 8 aa, Artificial Sequence
  Description of Artificial Sequence: Synthetic peptide
IIPIFGTA

SEQ ID NO: 68 - protein, 8 aa, Artificial Sequence
  Description of Artificial Sequence: Synthetic peptide
ITPMFGTA

SEQ ID NO: 69 - protein, 8 aa, Artificial Sequence
  Description of Artificial Sequence: Synthetic peptide
ISAMFGTA

SEQ ID NO: 70 - protein, 8 aa, Artificial Sequence
  Description of Artificial Sequence: Synthetic peptide
IIPIFGTA

SEQ ID NO: 71 - protein, 8 aa, Artificial Sequence
  Description of Artificial Sequence: Synthetic peptide
ITPMFGTA

SEQ ID NO: 72 - protein, 8 aa, Artificial Sequence
  Description of Artificial Sequence: Synthetic peptide
ISPMFGTA

SEQ ID NO: 73 - protein, 17 aa, Artificial Sequence
  Description of Artificial Sequence: Synthetic peptide
ARDDGYAPSGGLREFDV

SEQ ID NO: 74 - protein, 14 aa, Artificial Sequence
  Description of Artificial Sequence: Synthetic peptide
ARGRGAYMGPSMDV

SEQ ID NO: 75 - protein, 14 aa, Artificial Sequence
  Description of Artificial Sequence: Synthetic peptide
ARGARYYAGGYFDV

SEQ ID NO: 76 - protein, 18 aa, Artificial Sequence
  Description of Artificial Sequence: Synthetic peptide
ARDSGNYDGYGPGSRFDV

SEQ ID NO: 77 - protein, 14 aa, Artificial Sequence
  Description of Artificial Sequence: Synthetic peptide
ARERGSWSFGYFDV

SEQ ID NO: 78 - protein, 14 aa, Artificial Sequence
  Description of Artificial Sequence: Synthetic peptide
ARSRTYADGRTFDV

SEQ ID NO: 79 - protein, 17 aa, Artificial Sequence
  Description of Artificial Sequence: Synthetic peptide
ARELGYLAGSPSPGFDY

SEQ ID NO: 80 - protein, 14 aa, Artificial Sequence
  Description of Artificial Sequence: Synthetic peptide
ARSRRYWADGGFDY

SEQ ID NO: 81 - protein, 15 aa, Artificial Sequence
  Description of Artificial Sequence: Synthetic peptide
AREGGYSPGGVDFDY

SEQ ID NO: 82 - protein, 14 aa, Artificial Sequence
  Description of Artificial Sequence: Synthetic peptide
ARGTTYSTARYFDV

SEQ ID NO: 83 - protein, 14 aa, Artificial Sequence
  Description of Artificial Sequence: Synthetic peptide
ARSPAYYFGPNMDV

SEQ ID NO: 84 - protein, 16 aa, Artificial Sequence
  Description of Artificial Sequence: Synthetic peptide
ARSSRYAPSDSTNFDQ

SEQ ID NO: 85 - protein, 14 aa, Artificial Sequence
  Description of Artificial Sequence: Synthetic peptide
ARGDRFYVGERFDV

SEQ ID NO: 86 - protein, 18 aa, Artificial Sequence
  Description of Artificial Sequence: Synthetic peptide
ARGGGVGRIWIAGYGFDQ

SEQ ID NO: 87 - protein, 18 aa, Artificial Sequence
  Description of Artificial Sequence: Synthetic peptide
ARGPGYHPAGASGQFFDL

SEQ ID NO: 88 - protein, 16 aa, Artificial Sequence
  Description of Artificial Sequence: Synthetic peptide
ARGRGYAPDALTNFDV

SEQ ID NO: 89 - protein, 15 aa, Artificial Sequence
  Description of Artificial Sequence: Synthetic peptide
ARGRGYIAVAGDMDV

SEQ ID NO: 90 - protein, 17 aa, Artificial Sequence
  Description of Artificial Sequence: Synthetic peptide
ARGDAYYVGGGARPFDL

SEQ ID NO: 91 - protein, 18 aa, Artificial Sequence
  Description of Artificial Sequence: Synthetic peptide
ARGYSYYPGGGGGRNFDY

SEQ ID NO: 92 - protein, 17 aa, Artificial Sequence
  Description of Artificial Sequence: Synthetic peptide
ARAPTYYASRDSYNFDY

SEQ ID NO: 93 - protein, 14 aa, Artificial Sequence
  Description of Artificial Sequence: Synthetic peptide
ARDTTYIAGGHFDV

SEQ ID NO: 94 - protein, 15 aa, Artificial Sequence
  Description of Artificial Sequence: Synthetic peptide
ARASGYFTGWGTFDY

SEQ ID NO: 95 - protein, 14 aa, Artificial Sequence
  Description of Artificial Sequence: Synthetic peptide
ARGRYYYTVGVYDV

SEQ ID NO: 96 - protein, 20 aa, Artificial Sequence
  Description of Artificial Sequence: Synthetic peptide
ARGGGYSADGGAGNNTIFDV

SEQ ID NO: 97 - protein, 15 aa, Artificial Sequence
  Description of Artificial Sequence: Synthetic peptide
ARERGYTVGGGGMDV

SEQ ID NO: 98 - protein, 17 aa, Artificial Sequence
  Description of Artificial Sequence: Synthetic peptide
AREYLGDDYSSGSYFDV

SEQ ID NO: 99 - protein, 14 aa, Artificial Sequence
  Description of Artificial Sequence: Synthetic peptide
ARESGYSGTGQFDV

SEQ ID NO: 100 - protein, 15 aa, Artificial Sequence
  Description of Artificial Sequence: Synthetic peptide
ARSGGYYDYGVGYDQ

SEQ ID NO: 101 - protein, 15 aa, Artificial Sequence
  Description of Artificial Sequence: Synthetic peptide
ARSGGYSPSIGGFDV

SEQ ID NO: 102 - protein, 16 aa, Artificial Sequence
  Description of Artificial Sequence: Synthetic peptide
ARGPGYDPSSLRGFDV

SEQ ID NO: 103 - protein, 10 aa, Artificial Sequence
  Description of Artificial Sequence: Synthetic peptide
ARGEEAYYDL

SEQ ID NO: 104 - protein, 15 aa, Artificial Sequence
  Description of Artificial Sequence: Synthetic peptide
ARGTSYLPGRSGFDV

SEQ ID NO: 105 - protein, 15 aa, Artificial Sequence
  Description of Artificial Sequence: Synthetic peptide
ARGRGYDPSVGGFDV

SEQ ID NO: 106 - protein, 20 aa, Artificial Sequence
  Description of Artificial Sequence: Synthetic peptide
ARDSTPSVTSSLYRIPAFDV

SEQ ID NO: 107 - protein, 15 aa, Artificial Sequence
  Description of Artificial Sequence: Synthetic peptide
ARGPGYYPDSNNYDL

SEQ ID NO: 108 - protein, 15 aa, Artificial Sequence
  Description of Artificial Sequence: Synthetic peptide
ARGGTYSPGGTYFDV

SEQ ID NO: 109 - protein, 12 aa, Artificial Sequence
  Description of Artificial Sequence: Synthetic peptide
RSVLYSSNNKNY

SEQ ID NO: 110 - protein, 6 aa, Artificial Sequence
  Description of Artificial Sequence: Synthetic peptide
NIGSKS

SEQ ID NO: 111 - protein, 6 aa, Artificial Sequence
  Description of Artificial Sequence: Synthetic peptide
QTVSNY

SEQ ID NO: 112 - protein, 8 aa, Artificial Sequence
  Description of Artificial Sequence: Synthetic peptide
SSNIGSNT

SEQ ID NO: 113 - protein, 6 aa, Artificial Sequence
  Description of Artificial Sequence: Synthetic peptide
HIGSKS

SEQ ID NO: 114 - protein, 9 aa, Artificial Sequence
  Description of Artificial Sequence: Synthetic peptide
SSDVGGYNH

SEQ ID NO: 115 - protein, 9 aa, Artificial Sequence
  Description of Artificial Sequence: Synthetic peptide
SSDVGGYNY

SEQ ID NO: 116 - protein, 8 aa, Artificial Sequence
  Description of Artificial Sequence: Synthetic peptide
SSNMGRNT

SEQ ID NO: 117 - protein, 8 aa, Artificial Sequence
  Description of Artificial Sequence: Synthetic peptide
SGSIASTY

SEQ ID NO: 118 - protein, 8 aa, Artificial Sequence
  Description of Artificial Sequence: Synthetic peptide
SGSIASNY

SEQ ID NO: 119 - protein, 9 aa, Artificial Sequence
  Description of Artificial Sequence: Synthetic peptide
SSNIGAGYD

SEQ ID NO: 120 - protein, 8 aa, Artificial Sequence
  Description of Artificial Sequence: Synthetic peptide
SGSIASNY

SEQ ID NO: 121 - protein, 6 aa, Artificial Sequence
  Description of Artificial Sequence: Synthetic peptide
DIGSKS

SEQ ID NO: 122 - protein, 9 aa, Artificial Sequence
  Description of Artificial Sequence: Synthetic peptide
SGSVSTSNY

SEQ ID NO: 123 - protein, 8 aa, Artificial Sequence
  Description of Artificial Sequence: Synthetic peptide
SNNVGNQG

SEQ ID NO: 124 - protein, 12 aa, Artificial Sequence
  Description of Artificial Sequence: Synthetic peptide
RSLFDSSDNKNY

SEQ ID NO: 125 - protein, 12 aa, Artificial Sequence
  Description of Artificial Sequence: Synthetic peptide
RSVLYSSNNKNY

SEQ ID NO: 126 - protein, 8 aa, Artificial Sequence
  Description of Artificial Sequence: Synthetic peptide
SSNIGVNY

SEQ ID NO: 127 - protein, 8 aa, Artificial Sequence
  Description of Artificial Sequence: Synthetic peptide
SSNIGSNT

SEQ ID NO: 128 - protein, 7 aa, Artificial Sequence
  Description of Artificial Sequence: Synthetic peptide
QSVDRGY

SEQ ID NO: 129 - protein, 9 aa, Artificial Sequence
  Description of Artificial Sequence: Synthetic peptide
SSDIGAYNY

SEQ ID NO: 130 - protein, 6 aa, Artificial Sequence
  Description of Artificial Sequence: Synthetic peptide
ALPKQY

SEQ ID NO: 131 - protein, 8 aa, Artificial Sequence
  Description of Artificial Sequence: Synthetic peptide
SDNVGNQG

SEQ ID NO: 132 - protein, 8 aa, Artificial Sequence
  Description of Artificial Sequence: Synthetic peptide
NNNVGNQG

SEQ ID NO: 133 - protein, 9 aa, Artificial Sequence
  Description of Artificial Sequence: Synthetic peptide
SSDVGAHNF

SEQ ID NO: 134 - protein, 6 aa, Artificial Sequence
  Description of Artificial Sequence: Synthetic peptide
QSVDSH

SEQ ID NO: 135 - protein, 8 aa, Artificial Sequence
  Description of Artificial Sequence: Synthetic peptide
TSNVGRNT

SEQ ID NO: 136 - protein, 8 aa, Artificial Sequence
  Description of Artificial Sequence: Synthetic peptide
RSNIGSNT

SEQ ID NO: 137 - protein, 8 aa, Artificial Sequence
  Description of Artificial Sequence: Synthetic peptide
RSNIGRNT

SEQ ID NO: 138 - protein, 8 aa, Artificial Sequence
  Description of Artificial Sequence: Synthetic peptide
SNNVGNQG

SEQ ID NO: 139 - protein, 6 aa, Artificial Sequence
  Description of Artificial Sequence: Synthetic peptide
QSVSSF

SEQ ID NO: 140 - protein, 6 aa, Artificial Sequence
  Description of Artificial Sequence: Synthetic peptide
ALPKQY

SEQ ID NO: 141 - protein, 8 aa, Artificial Sequence
  Description of Artificial Sequence: Synthetic peptide
SGSIASNY

SEQ ID NO: 142 - protein, 7 aa, Artificial Sequence
  Description of Artificial Sequence: Synthetic peptide
NGPSNYI

SEQ ID NO: 143 - protein, 7 aa, Artificial Sequence
  Description of Artificial Sequence: Synthetic peptide
QSVSSSY

SEQ ID NO: 144 - protein, 8 aa, Artificial Sequence
  Description of Artificial Sequence: Synthetic peptide
SSNIGVSF

SEQ ID NO: 145 - protein, 3 aa, Artificial Sequence
  Description of Artificial Sequence: Synthetic peptide
WAS

SEQ ID NO: 146 - protein, 3 aa, Artificial Sequence
  Description of Artificial Sequence: Synthetic peptide
DDS

SEQ ID NO: 147 - protein, 3 aa, Artificial Sequence
  Description of Artificial Sequence: Synthetic peptide
AAS

SEQ ID NO: 148 - protein, 3 aa, Artificial Sequence
  Description of Artificial Sequence: Synthetic peptide
SNN

SEQ ID NO: 149 - protein, 3 aa, Artificial Sequence
  Description of Artificial Sequence: Synthetic peptide
SNN

SEQ ID NO: 150 - protein, 3 aa, Artificial Sequence
  Description of Artificial Sequence: Synthetic peptide
DVS

SEQ ID NO: 151 - protein, 3 aa, Artificial Sequence
  Description of Artificial Sequence: Synthetic peptide
EVT

SEQ ID NO: 152 - protein, 3 aa, Artificial Sequence
  Description of Artificial Sequence: Synthetic peptide
DND

SEQ ID NO: 153 - protein, 3 aa, Artificial Sequence
  Description of Artificial Sequence: Synthetic peptide
EDH

SEQ ID NO: 154 - protein, 3 aa, Artificial Sequence
  Description of Artificial Sequence: Synthetic peptide
EDN

SEQ ID NO: 155 - protein, 3 aa, Artificial Sequence
  Description of Artificial Sequence: Synthetic peptide
DNS

SEQ ID NO: 156 - protein, 3 aa, Artificial Sequence
  Description of Artificial Sequence: Synthetic peptide
EDN

SEQ ID NO: 157 - protein, 3 aa, Artificial Sequence
  Description of Artificial Sequence: Synthetic peptide
DDI

SEQ ID NO: 158 - protein, 3 aa, Artificial Sequence
  Description of Artificial Sequence: Synthetic peptide
STN

SEQ ID NO: 159 - protein, 3 aa, Artificial Sequence
  Description of Artificial Sequence: Synthetic peptide
RNN

SEQ ID NO: 160 - protein, 3 aa, Artificial Sequence
  Description of Artificial Sequence: Synthetic peptide
WAS

SEQ ID NO: 161 - protein, 3 aa, Artificial Sequence
  Description of Artificial Sequence: Synthetic peptide
WAS

SEQ ID NO: 162 - protein, 3 aa, Artificial Sequence
  Description of Artificial Sequence: Synthetic peptide
RNN

SEQ ID NO: 163 - protein, 3 aa, Artificial Sequence
  Description of Artificial Sequence: Synthetic peptide
SNN

SEQ ID NO: 164 - protein, 3 aa, Artificial Sequence
  Description of Artificial Sequence: Synthetic peptide
GAS

SEQ ID NO: 165 - protein, 3 aa, Artificial Sequence
  Description of Artificial Sequence: Synthetic peptide
EVS

SEQ ID NO: 166 - protein, 3 aa, Artificial Sequence
  Description of Artificial Sequence: Synthetic peptide
KDS

SEQ ID NO: 167 - protein, 3 aa, Artificial Sequence
  Description of Artificial Sequence: Synthetic peptide
RDN

SEQ ID NO: 168 - protein, 3 aa, Artificial Sequence
  Description of Artificial Sequence: Synthetic peptide
RNN

SEQ ID NO: 169 - protein, 3 aa, Artificial Sequence
  Description of Artificial Sequence: Synthetic peptide
EVN

SEQ ID NO: 170 - protein, 3 aa, Artificial Sequence
  Description of Artificial Sequence: Synthetic peptide
GAS

SEQ ID NO: 171 - protein, 3 aa, Artificial Sequence
  Description of Artificial Sequence: Synthetic peptide
NDN

SEQ ID NO: 172 - protein, 3 aa, Artificial Sequence
  Description of Artificial Sequence: Synthetic peptide
SNN

SEQ ID NO: 173 - protein, 3 aa, Artificial Sequence
  Description of Artificial Sequence: Synthetic peptide
SNN

SEQ ID NO: 174 - protein, 3 aa, Artificial Sequence
  Description of Artificial Sequence: Synthetic peptide
KNN

SEQ ID NO: 175 - protein, 3 aa, Artificial Sequence
  Description of Artificial Sequence: Synthetic peptide
DAS

SEQ ID NO: 176 - protein, 3 aa, Artificial Sequence
  Description of Artificial Sequence: Synthetic peptide
KDT

SEQ ID NO: 177 - protein, 3 aa, Artificial Sequence
  Description of Artificial Sequence: Synthetic peptide
EDN

SEQ ID NO: 178 - protein, 7 aa, Artificial Sequence
  Description of Artificial Sequence: Synthetic peptide
LNSDGSH

SEQ ID NO: 179 - protein, 3 aa, Artificial Sequence
  Description of Artificial Sequence: Synthetic peptide
GAS

SEQ ID NO: 180 - protein, 3 aa, Artificial Sequence
  Description of Artificial Sequence: Synthetic peptide
RDD

SEQ ID NO: 181 - protein, 9 aa, Artificial Sequence
  Description of Artificial Sequence: Synthetic peptide
QQYYSGSWT

SEQ ID NO: 182 - protein, 11 aa, Artificial Sequence
  Description of Artificial Sequence: Synthetic peptide
QVWDRSSDHVV

SEQ ID NO: 183 - protein, 10 aa, Artificial Sequence
  Description of Artificial Sequence: Synthetic peptide
QQYDNLPPVT

SEQ ID NO: 184 - protein, 11 aa, Artificial Sequence
  Description of Artificial Sequence: Synthetic peptide
SAWDDSLGGEV

SEQ ID NO: 185 - protein, 11 aa, Artificial Sequence
  Description of Artificial Sequence: Synthetic peptide
QVWDSSNDHPV

SEQ ID NO: 186 - protein, 10 aa, Artificial Sequence
  Description of Artificial Sequence: Synthetic peptide
TSYAGSNSLV

SEQ ID NO: 187 - protein, 9 aa, Artificial Sequence
  Description of Artificial Sequence: Synthetic peptide
SSYAGGKWV

SEQ ID NO: 188 - protein, 11 aa, Artificial Sequence
  Description of Artificial Sequence: Synthetic peptide
AAWDDSLNGPV

SEQ ID NO: 189 - protein, 9 aa, Artificial Sequence
  Description of Artificial Sequence: Synthetic peptide
QSFDASTLV

SEQ ID NO: 190 - protein, 11 aa, Artificial Sequence
  Description of Artificial Sequence: Synthetic peptide
QSYDSDNHEVI

SEQ ID NO: 191 - protein, 11 aa, Artificial Sequence
  Description of Artificial Sequence: Synthetic peptide
QSYDSSLSVVV

SEQ ID NO: 192 - protein, 10 aa, Artificial Sequence
  Description of Artificial Sequence: Synthetic peptide
QSYDTSNRKV

SEQ ID NO: 193 - protein, 12 aa, Artificial Sequence
  Description of Artificial Sequence: Synthetic peptide
QVWDTNSDPVFV

SEQ ID NO: 194 - protein, 10 aa, Artificial Sequence
  Description of Artificial Sequence: Synthetic peptide
VLYMGSGISM

SEQ ID NO: 195 - protein, 11 aa, Artificial Sequence
  Description of Artificial Sequence: Synthetic peptide
SAWDSSLSAWV

SEQ ID NO: 196 - protein, 11 aa, Artificial Sequence
  Description of Artificial Sequence: Synthetic peptide
QQYFSSPPIFT

SEQ ID NO: 197 - protein, 9 aa, Artificial Sequence
  Description of Artificial Sequence: Synthetic peptide
QQYYSTPPT

SEQ ID NO: 198 - protein, 12 aa, Artificial Sequence
  Description of Artificial Sequence: Synthetic peptide
GVWDDSLNGHWV

SEQ ID NO: 199 - protein, 11 aa, Artificial Sequence
  Description of Artificial Sequence: Synthetic peptide
AAWDDSLKGRV

SEQ ID NO: 200 - protein, 9 aa, Artificial Sequence
  Description of Artificial Sequence: Synthetic peptide
QQYGSSRLS

SEQ ID NO: 201 - protein, 10 aa, Artificial Sequence
  Description of Artificial Sequence: Synthetic peptide
SSYAGSNNVV

SEQ ID NO: 202 - protein, 9 aa, Artificial Sequence
  Description of Artificial Sequence: Synthetic peptide
QAWDSSTAV

SEQ ID NO: 203 - protein, 11 aa, Artificial Sequence
  Description of Artificial Sequence: Synthetic peptide
SAWDSSLTAVV

SEQ ID NO: 204 - protein, 11 aa, Artificial Sequence
  Description of Artificial Sequence: Synthetic peptide
SAWDSSLSAWV

SEQ ID NO: 205 - protein, 11 aa, Artificial Sequence
  Description of Artificial Sequence: Synthetic peptide
AAWDDSLDGPV

SEQ ID NO: 206 - protein, 9 aa, Artificial Sequence
  Description of Artificial Sequence: Synthetic peptide
QQRSMWPLT

SEQ ID NO: 207 - protein, 11 aa, Artificial Sequence
  Description of Artificial Sequence: Synthetic peptide
SSWDDDLNGPV

SEQ ID NO: 208 - protein, 8 aa, Artificial Sequence
  Description of Artificial Sequence: Synthetic peptide
QSYDSSVV

SEQ ID NO: 209 - protein, 11 aa, Artificial Sequence
  Description of Artificial Sequence: Synthetic peptide
AAWDVSLNGQV

SEQ ID NO: 210 - protein, 11 aa, Artificial Sequence
  Description of Artificial Sequence: Synthetic peptide
SAWDSSLSDWV

SEQ ID NO: 211 - protein, 9 aa, Artificial Sequence
  Description of Artificial Sequence: Synthetic peptide
QQRFNWPPT

SEQ ID NO: 212 - protein, 10 aa, Artificial Sequence
  Description of Artificial Sequence: Synthetic peptide
QSADASENSV

SEQ ID NO: 213 - protein, 9 aa, Artificial Sequence
  Description of Artificial Sequence: Synthetic peptide
QSYDTSNLV

SEQ ID NO: 214 - protein, 10 aa, Artificial Sequence
  Description of Artificial Sequence: Synthetic peptide
ETWDSNTHVV

SEQ ID NO: 215 - protein, 9 aa, Artificial Sequence
  Description of Artificial Sequence: Synthetic peptide
QQVNSFPRT

SEQ ID NO: 216 - protein, 11 aa, Artificial Sequence
  Description of Artificial Sequence: Synthetic peptide
SAWDESLSSVL

SEQ ID NO: 217 - protein, 8 aa, Artificial Sequence
  Description of Artificial Sequence: Synthetic peptide
GGTFSSYA

SEQ ID NO: 218 - protein, 8 aa, Artificial Sequence
  Description of Artificial Sequence: Synthetic peptide
GVTFSSYA

SEQ ID NO: 219 - protein, 8 aa, Artificial Sequence
  Description of Artificial Sequence: Synthetic peptide
GGTFSSYA

SEQ ID NO: 220 - protein, 8 aa, Artificial Sequence
  Description of Artificial Sequence: Synthetic peptide
GGIFSSYA

SEQ ID NO: 221 - protein, 8 aa, Artificial Sequence
  Description of Artificial Sequence: Synthetic peptide
GVIFSSYA

SEQ ID NO: 222 - protein, 8 aa, Artificial Sequence
  Description of Artificial Sequence: Synthetic peptide
GGTFSSYA

SEQ ID NO: 223 - protein, 8 aa, Artificial Sequence
  Description of Artificial Sequence: Synthetic peptide
GGTFSSYA

SEQ ID NO: 224 - protein, 8 aa, Artificial Sequence
  Description of Artificial Sequence: Synthetic peptide
GGPFRSYA

SEQ ID NO: 225 - protein, 8 aa, Artificial Sequence
  Description of Artificial Sequence: Synthetic peptide
GVPFSSYA

SEQ ID NO: 226 - protein, 8 aa, Artificial Sequence
  Description of Artificial Sequence: Synthetic peptide
GVTFSSYA

SEQ ID NO: 227 - protein, 8 aa, Artificial Sequence
  Description of Artificial Sequence: Synthetic peptide
GVIFSSYA

SEQ ID NO: 228 - protein, 8 aa, Artificial Sequence
  Description of Artificial Sequence: Synthetic peptide
GVTFSSYA

SEQ ID NO: 229 - protein, 8 aa, Artificial Sequence
  Description of Artificial Sequence: Synthetic peptide
GGTFSSYA

SEQ ID NO: 230 - protein, 8 aa, Artificial Sequence
  Description of Artificial Sequence: Synthetic peptide
GGTFSSYA

SEQ ID NO: 231 - protein, 8 aa, Artificial Sequence
  Description of Artificial Sequence: Synthetic peptide
GGPFSSYA

SEQ ID NO: 232 - protein, 8 aa, Artificial Sequence
  Description of Artificial Sequence: Synthetic peptide
GGIFSSYA

SEQ ID NO: 233 - protein, 8 aa, Artificial Sequence
  Description of Artificial Sequence: Synthetic peptide
GGIFRSYA

SEQ ID NO: 234 - protein, 8 aa, Artificial Sequence
  Description of Artificial Sequence: Synthetic peptide
GGTFSSYA

SEQ ID NO: 235 - protein, 8 aa, Artificial Sequence
  Description of Artificial Sequence: Synthetic peptide
GVTFSSYA

SEQ ID NO: 236 - protein, 8 aa, Artificial Sequence
  Description of Artificial Sequence: Synthetic peptide
GGTFSSYA

SEQ ID NO: 237 - protein, 8 aa, Artificial Sequence
  Description of Artificial Sequence: Synthetic peptide
GGTFRSYA

SEQ ID NO: 238 - protein, 8 aa, Artificial Sequence
  Description of Artificial Sequence: Synthetic peptide
GGTFSSYA

SEQ ID NO: 239 - protein, 8 aa, Artificial Sequence
  Description of Artificial Sequence: Synthetic peptide
GGPFSSYA

SEQ ID NO: 240 - protein, 8 aa, Artificial Sequence
  Description of Artificial Sequence: Synthetic peptide
GVTFSSYA

SEQ ID NO: 241 - protein, 8 aa, Artificial Sequence
  Description of Artificial Sequence: Synthetic peptide
GGTFSSYA

SEQ ID NO: 242 - protein, 8 aa, Artificial Sequence
  Description of Artificial Sequence: Synthetic peptide
GVTFRSYA

SEQ ID NO: 243 - protein, 8 aa, Artificial Sequence
  Description of Artificial Sequence: Synthetic peptide
GGTFSSYA

SEQ ID NO: 244 - protein, 8 aa, Artificial Sequence
  Description of Artificial Sequence: Synthetic peptide
GVTFSSYA

SEQ ID NO: 245 - protein, 8 aa, Artificial Sequence
  Description of Artificial Sequence: Synthetic peptide
GGPFSSYA

SEQ ID NO: 246 - protein, 8 aa, Artificial Sequence
  Description of Artificial Sequence: Synthetic peptide
GGIFSSYA

SEQ ID NO: 247 - protein, 8 aa, Artificial Sequence
  Description of Artificial Sequence: Synthetic peptide
IITIFGTA

SEQ ID NO: 248 - protein, 8 aa, Artificial Sequence
  Description of Artificial Sequence: Synthetic peptide
ISPIFGTA

SEQ ID NO: 249 - protein, 8 aa, Artificial Sequence
  Description of Artificial Sequence: Synthetic peptide
ISAIFGTA

SEQ ID NO: 250 - protein, 8 aa, Artificial Sequence
  Description of Artificial Sequence: Synthetic peptide
ITPIFGTA

SEQ ID NO: 251 - protein, 8 aa, Artificial Sequence
  Description of Artificial Sequence: Synthetic peptide
ISPIFGTA

SEQ ID NO: 252 - protein, 8 aa, Artificial Sequence
  Description of Artificial Sequence: Synthetic peptide
ISPIFGTA

SEQ ID NO: 253 - protein, 8 aa, Artificial Sequence
  Description of Artificial Sequence: Synthetic peptide
IITIFGTA

SEQ ID NO: 254 - protein, 8 aa, Artificial Sequence
  Description of Artificial Sequence: Synthetic peptide
IIPIFGTA

SEQ ID NO: 255 - protein, 8 aa, Artificial Sequence
  Description of Artificial Sequence: Synthetic peptide
ISPLFGTA

SEQ ID NO: 256 - protein, 8 aa, Artificial Sequence
  Description of Artificial Sequence: Synthetic peptide
ISPMFGTA

SEQ ID NO: 257 - protein, 8 aa, Artificial Sequence
  Description of Artificial Sequence: Synthetic peptide
IIPIFGTA

SEQ ID NO: 258 - protein, 8 aa, Artificial Sequence
  Description of Artificial Sequence: Synthetic peptide
ISPVFGTA

SEQ ID NO: 259 - protein, 8 aa, Artificial Sequence
  Description of Artificial Sequence: Synthetic peptide
IVPLFGTA

SEQ ID NO: 260 - protein, 8 aa, Artificial Sequence
  Description of Artificial Sequence: Synthetic peptide
IIPIFGTA

SEQ ID NO: 261 - protein, 8 aa, Artificial Sequence
  Description of Artificial Sequence: Synthetic peptide
ISPIFGTA

SEQ ID NO: 262 - protein, 8 aa, Artificial Sequence
  Description of Artificial Sequence: Synthetic peptide
ISAIFGTA

SEQ ID NO: 263 - protein, 8 aa, Artificial Sequence
  Description of Artificial Sequence: Synthetic peptide
IIPMFGTA

SEQ ID NO: 264 - protein, 8 aa, Artificial Sequence
  Description of Artificial Sequence: Synthetic peptide
INPIFGTA

SEQ ID NO: 265 - protein, 8 aa, Artificial Sequence
  Description of Artificial Sequence: Synthetic peptide
ISPMFGTA

SEQ ID NO: 266 - protein, 8 aa, Artificial Sequence
  Description of Artificial Sequence: Synthetic peptide
ITPLFGTA

SEQ ID NO: 267 - protein, 8 aa, Artificial Sequence
  Description of Artificial Sequence: Synthetic peptide
IMPIFGTA

SEQ ID NO: 268 - protein, 8 aa, Artificial Sequence
  Description of Artificial Sequence: Synthetic peptide
ISPMFGTA

SEQ ID NO: 269 - protein, 8 aa, Artificial Sequence
  Description of Artificial Sequence: Synthetic peptide
IIPIFGTA

SEQ ID NO: 270 - protein, 8 aa, Artificial Sequence
  Description of Artificial Sequence: Synthetic peptide
ITPIFGTA

SEQ ID NO: 271 - protein, 8 aa, Artificial Sequence
  Description of Artificial Sequence: Synthetic peptide
ISPMFGTA

SEQ ID NO: 272 - protein, 8 aa, Artificial Sequence
  Description of Artificial Sequence: Synthetic peptide
ISGIFGTA

SEQ ID NO: 273 - protein, 8 aa, Artificial Sequence
  Description of Artificial Sequence: Synthetic peptide
ISPIFGTA

SEQ ID NO: 274 - protein, 8 aa, Artificial Sequence
  Description of Artificial Sequence: Synthetic peptide
ISPMFGTA

SEQ ID NO: 275 - protein, 8 aa, Artificial Sequence
  Description of Artificial Sequence: Synthetic peptide
ISPMFGTA

SEQ ID NO: 276 - protein, 8 aa, Artificial Sequence
  Description of Artificial Sequence: Synthetic peptide
ISPIFGTA

SEQ ID NO: 277 - protein, 10 aa, Artificial Sequence
  Description of Artificial Sequence: Synthetic peptide
ARGATGFYDV

SEQ ID NO: 278 - protein, 16 aa, Artificial Sequence
  Description of Artificial Sequence: Synthetic peptide
ARGREYYASNGDSFDV

SEQ ID NO: 279 - protein, 20 aa, Artificial Sequence
  Description of Artificial Sequence: Synthetic peptide
ARDLSRDSLNLPGSSPGYDL

SEQ ID NO: 280 - protein, 16 aa, Artificial Sequence
  Description of Artificial Sequence: Synthetic peptide
ARGSGYYVAASGAFDV

SEQ ID NO: 281 - protein, 16 aa, Artificial Sequence
  Description of Artificial Sequence: Synthetic peptide
ARSRGYAPGTSFHYDV

SEQ ID NO: 282 - protein, 14 aa, Artificial Sequence
  Description of Artificial Sequence: Synthetic peptide
ARDQGGTRGNYFDV

SEQ ID NO: 283 - protein, 10 aa, Artificial Sequence
  Description of Artificial Sequence: Synthetic peptide
ARGGGGRFDV

SEQ ID NO: 284 - protein, 10 aa, Artificial Sequence
  Description of Artificial Sequence: Synthetic peptide
ARGGVYSFDV

SEQ ID NO: 285 - protein, 18 aa, Artificial Sequence
  Description of Artificial Sequence: Synthetic peptide
ARGLGTYSPSLYPRGMDV

SEQ ID NO: 286 - protein, 15 aa, Artificial Sequence
  Description of Artificial Sequence: Synthetic peptide
ARGRAYLSVRGSFDV

SEQ ID NO: 287 - protein, 10 aa, Artificial Sequence
  Description of Artificial Sequence: Synthetic peptide
ARGGSGSFDV

SEQ ID NO: 288 - protein, 18 aa, Artificial Sequence
  Description of Artificial Sequence: Synthetic peptide
ARSRGYTVSSLAGRYFDQ

SEQ ID NO: 289 - protein, 10 aa, Artificial Sequence
  Description of Artificial Sequence: Synthetic peptide
ARGLGLYFDV

SEQ ID NO: 290 - protein, 15 aa, Artificial Sequence
  Description of Artificial Sequence: Synthetic peptide
ARVRGGYGPYGDFDV

SEQ ID NO: 291 - protein, 16 aa, Artificial Sequence
  Description of Artificial Sequence: Synthetic peptide
ARGRSYIVSVSPGFDV

SEQ ID NO: 292 - protein, 16 aa, Artificial Sequence
  Description of Artificial Sequence: Synthetic peptide
ARDSGIASGYTAYMDY

SEQ ID NO: 293 - protein, 10 aa, Artificial Sequence
  Description of Artificial Sequence: Synthetic peptide
ARGAGSTFDV

SEQ ID NO: 294 - protein, 14 aa, Artificial Sequence
  Description of Artificial Sequence: Synthetic peptide
ARGESAYYSRNYDV

SEQ ID NO: 295 - protein, 16 aa, Artificial Sequence
  Description of Artificial Sequence: Synthetic peptide
ARGGGYYPAGVGRYDV

SEQ ID NO: 296 - protein, 14 aa, Artificial Sequence
  Description of Artificial Sequence: Synthetic peptide
ARGPTLYSPPVFDV

SEQ ID NO: 297 - protein, 16 aa, Artificial Sequence
  Description of Artificial Sequence: Synthetic peptide
ARGAGVSAGPSWPFDV

SEQ ID NO: 298 - protein, 16 aa, Artificial Sequence
  Description of Artificial Sequence: Synthetic peptide
ARSRGYNVAASFGFDV

SEQ ID NO: 299 - protein, 14 aa, Artificial Sequence
  Description of Artificial Sequence: Synthetic peptide
ARGTDYSGYRGFDV

SEQ ID NO: 300 - protein, 9 aa, Artificial Sequence
  Description of Artificial Sequence: Synthetic peptide
ARGGGVFDV

SEQ ID NO: 301 - protein, 15 aa, Artificial Sequence
  Description of Artificial Sequence: Synthetic peptide
AREGGYSPGGVDFDY

SEQ ID NO: 302 - protein, 14 aa, Artificial Sequence
  Description of Artificial Sequence: Synthetic peptide
ARSPAYYFGPNMDV

SEQ ID NO: 303 - protein, 18 aa, Artificial Sequence
  Description of Artificial Sequence: Synthetic peptide
ARGPGYHPAGASGQFFDL

SEQ ID NO: 304 - protein, 16 aa, Artificial Sequence
  Description of Artificial Sequence: Synthetic peptide
ARGRGYAPDALTNFDV

SEQ ID NO: 305 - protein, 18 aa, Artificial Sequence
  Description of Artificial Sequence: Synthetic peptide
ARGYSYYPGGGGGRNFDY

SEQ ID NO: 306 - protein, 15 aa, Artificial Sequence
  Description of Artificial Sequence: Synthetic peptide
ARSGGYYDYGVGYDQ

SEQ ID NO: 307 - protein, 8 aa, Artificial Sequence
  Description of Artificial Sequence: Synthetic peptide
SSNIGSNT

SEQ ID NO: 308 - protein, 6 aa, Artificial Sequence
  Description of Artificial Sequence: Synthetic peptide
NIATKS

SEQ ID NO: 309 - protein, 6 aa, Artificial Sequence
  Description of Artificial Sequence: Synthetic peptide
NIATKS

SEQ ID NO: 310 - protein, 8 aa, Artificial Sequence
  Description of Artificial Sequence: Synthetic peptide
INNVGDQG

SEQ ID NO: 311 - protein, 6 aa, Artificial Sequence
  Description of Artificial Sequence: Synthetic peptide
NIGSKS

SEQ ID NO: 312 - protein, 8 aa, Artificial Sequence
  Description of Artificial Sequence: Synthetic peptide
SNNVGNQG

SEQ ID NO: 313 - protein, 8 aa, Artificial Sequence
  Description of Artificial Sequence: Synthetic peptide
TSNIGNNA

SEQ ID NO: 314 - protein, 8 aa, Artificial Sequence
  Description of Artificial Sequence: Synthetic peptide
GSNVGSNV

SEQ ID NO: 315 - protein, 8 aa, Artificial Sequence
  Description of Artificial Sequence: Synthetic peptide
SSNIGRND

SEQ ID NO: 316 - protein, 8 aa, Artificial Sequence
  Description of Artificial Sequence: Synthetic peptide
SSNIGSNT

SEQ ID NO: 317 - protein, 8 aa, Artificial Sequence
  Description of Artificial Sequence: Synthetic peptide
SSNLGSNY

SEQ ID NO: 318 - protein, 7 aa, Artificial Sequence
  Description of Artificial Sequence: Synthetic peptide
ESLCSTC

SEQ ID NO: 319 - protein, 9 aa, Artificial Sequence
  Description of Artificial Sequence: Synthetic peptide
TGAVTSGYY

SEQ ID NO: 320 - protein, 8 aa, Artificial Sequence
  Description of Artificial Sequence: Synthetic peptide
SSNIGSHS

SEQ ID NO: 321 - protein, 9 aa, Artificial Sequence
  Description of Artificial Sequence: Synthetic peptide
SSDVGGYNY

SEQ ID NO: 322 - protein, 6 aa, Artificial Sequence
  Description of Artificial Sequence: Synthetic peptide
SLRTSY

SEQ ID NO: 323 - protein, 8 aa, Artificial Sequence
  Description of Artificial Sequence: Synthetic peptide
SSNIGSNT

SEQ ID NO: 324 - protein, 8 aa, Artificial Sequence
  Description of Artificial Sequence: Synthetic peptide
SSNVGNQG

SEQ ID NO: 325 - protein, 12 aa, Artificial Sequence
  Description of Artificial Sequence: Synthetic peptide
QNVLYSSNNKNN

SEQ ID NO: 326 - protein, 9 aa, Artificial Sequence
  Description of Artificial Sequence: Synthetic peptide
SGSVSTTNY

SEQ ID NO: 327 - protein, 8 aa, Artificial Sequence
  Description of Artificial Sequence: Synthetic peptide
SNNVGKQG

SEQ ID NO: 328 - protein, 6 aa, Artificial Sequence
  Description of Artificial Sequence: Synthetic peptide
QYIDRS

SEQ ID NO: 329 - protein, 9 aa, Artificial Sequence
  Description of Artificial Sequence: Synthetic peptide
SGSVSSFNY

SEQ ID NO: 330 - protein, 8 aa, Artificial Sequence
  Description of Artificial Sequence: Synthetic peptide
SSNIGNNA

SEQ ID NO: 331 - protein, 8 aa, Artificial Sequence
  Description of Artificial Sequence: Synthetic peptide
SGSIASTY

SEQ ID NO: 332 - protein, 9 aa, Artificial Sequence
  Description of Artificial Sequence: Synthetic peptide
SSNIGAGYD

SEQ ID NO: 333 - protein, 8 aa, Artificial Sequence
  Description of Artificial Sequence: Synthetic peptide
SNNVGNQG

SEQ ID NO: 334 - protein, 12 aa, Artificial Sequence
  Description of Artificial Sequence: Synthetic peptide
RSLFDSSDNKNY

SEQ ID NO: 335 - protein, 8 aa, Artificial Sequence
  Description of Artificial Sequence: Synthetic peptide
SSNIGSNT

SEQ ID NO: 336 - protein, 8 aa, Artificial Sequence
  Description of Artificial Sequence: Synthetic peptide
RSNIGSNT

SEQ ID NO: 337 - protein, 3 aa, Artificial Sequence
  Description of Artificial Sequence: Synthetic peptide
SNN

SEQ ID NO: 338 - protein, 3 aa, Artificial Sequence
  Description of Artificial Sequence: Synthetic peptide
HDS

SEQ ID NO: 339 - protein, 3 aa, Artificial Sequence
  Description of Artificial Sequence: Synthetic peptide
RNS

SEQ ID NO: 340 - protein, 3 aa, Artificial Sequence
  Description of Artificial Sequence: Synthetic peptide
GAS

SEQ ID NO: 341 - protein, 3 aa, Artificial Sequence
  Description of Artificial Sequence: Synthetic peptide
YDS

SEQ ID NO: 342 - protein, 3 aa, Artificial Sequence
  Description of Artificial Sequence: Synthetic peptide
RNN

SEQ ID NO: 343 - protein, 3 aa, Artificial Sequence
  Description of Artificial Sequence: Synthetic peptide
SLN

SEQ ID NO: 344 - protein, 3 aa, Artificial Sequence
  Description of Artificial Sequence: Synthetic peptide
RNN

SEQ ID NO: 345 - protein, 3 aa, Artificial Sequence
  Description of Artificial Sequence: Synthetic peptide
GRD

SEQ ID NO: 346 - protein, 3 aa, Artificial Sequence
  Description of Artificial Sequence: Synthetic peptide
SNN

SEQ ID NO: 347 - protein, 3 aa, Artificial Sequence
  Description of Artificial Sequence: Synthetic peptide
RNS

SEQ ID NO: 348 - protein, 3 aa, Artificial Sequence
  Description of Artificial Sequence: Synthetic peptide
GAT

SEQ ID NO: 349 - protein, 3 aa, Artificial Sequence
  Description of Artificial Sequence: Synthetic peptide
STS

SEQ ID NO: 350 - protein, 3 aa, Artificial Sequence
  Description of Artificial Sequence: Synthetic peptide
GNS

SEQ ID NO: 351 - protein, 3 aa, Artificial Sequence
  Description of Artificial Sequence: Synthetic peptide
EVS

SEQ ID NO: 352 - protein, 3 aa, Artificial Sequence
  Description of Artificial Sequence: Synthetic peptide
QST

SEQ ID NO: 353 - protein, 3 aa, Artificial Sequence
  Description of Artificial Sequence: Synthetic peptide
SNN

SEQ ID NO: 354 - protein, 3 aa, Artificial Sequence
  Description of Artificial Sequence: Synthetic peptide
RND

SEQ ID NO: 355 - protein, 3 aa, Artificial Sequence
  Description of Artificial Sequence: Synthetic peptide
WAS

SEQ ID NO: 356 - protein, 3 aa, Artificial Sequence
  Description of Artificial Sequence: Synthetic peptide
NTN

SEQ ID NO: 357 - protein, 3 aa, Artificial Sequence
  Description of Artificial Sequence: Synthetic peptide
RNN

SEQ ID NO: 358 - protein, 3 aa, Artificial Sequence
  Description of Artificial Sequence: Synthetic peptide
YAS

SEQ ID NO: 359 - protein, 3 aa, Artificial Sequence
  Description of Artificial Sequence: Synthetic peptide
NTN

SEQ ID NO: 360 - protein, 3 aa, Artificial Sequence
  Description of Artificial Sequence: Synthetic peptide
YDD

SEQ ID NO: 361 - protein, 3 aa, Artificial Sequence
  Description of Artificial Sequence: Synthetic peptide
EDH

SEQ ID NO: 362 - protein, 3 aa, Artificial Sequence
  Description of Artificial Sequence: Synthetic peptide
DNS

SEQ ID NO: 363 - protein, 3 aa, Artificial Sequence
  Description of Artificial Sequence: Synthetic peptide
RNN

SEQ ID NO: 364 - protein, 3 aa, Artificial Sequence
  Description of Artificial Sequence: Synthetic peptide
WAS

SEQ ID NO: 365 - protein, 3 aa, Artificial Sequence
  Description of Artificial Sequence: Synthetic peptide
SNN

SEQ ID NO: 366 - protein, 3 aa, Artificial Sequence
  Description of Artificial Sequence: Synthetic peptide
SNN

SEQ ID NO: 367 - protein, 11 aa, Artificial Sequence
  Description of Artificial Sequence: Synthetic peptide
AAWDDSLNGPV

SEQ ID NO: 368 - protein, 12 aa, Artificial Sequence
  Description of Artificial Sequence: Synthetic peptide
AAWDDSLSGPWV

SEQ ID NO: 369 - protein, 11 aa, Artificial Sequence
  Description of Artificial Sequence: Synthetic peptide
SAWDSSLSDWV

SEQ ID NO: 370 - protein, 9 aa, Artificial Sequence
  Description of Artificial Sequence: Synthetic peptide
QQYSSSPYT

SEQ ID NO: 371 - protein, 11 aa, Artificial Sequence
  Description of Artificial Sequence: Synthetic peptide
QLWDHTNSHVV

SEQ ID NO: 372 - protein, 11 aa, Artificial Sequence
  Description of Artificial Sequence: Synthetic peptide
SAWDNTVSGWV

SEQ ID NO: 373 - protein, 11 aa, Artificial Sequence
  Description of Artificial Sequence: Synthetic peptide
EAWDDSLSGPV

SEQ ID NO: 374 - protein, 11 aa, Artificial Sequence
  Description of Artificial Sequence: Synthetic peptide
AAWDDRLNGFV

SEQ ID NO: 375 - protein, 11 aa, Artificial Sequence
  Description of Artificial Sequence: Synthetic peptide
AAWDASLMIYV

SEQ ID NO: 376 - protein, 11 aa, Artificial Sequence
  Description of Artificial Sequence: Synthetic peptide
AAWDDSLNGYV

SEQ ID NO: 377 - protein, 11 aa, Artificial Sequence
  Description of Artificial Sequence: Synthetic peptide
AAWDDSLNGVV

SEQ ID NO: 378 - protein, 9 aa, Artificial Sequence
  Description of Artificial Sequence: Synthetic peptide
QQYGSSPQT

SEQ ID NO: 379 - protein, 9 aa, Artificial Sequence
  Description of Artificial Sequence: Synthetic peptide
LLYYGGPWV

SEQ ID NO: 380 - protein, 11 aa, Artificial Sequence
  Description of Artificial Sequence: Synthetic peptide
AAWDDGLSGWV

SEQ ID NO: 381 - protein, 11 aa, Artificial Sequence
  Description of Artificial Sequence: Synthetic peptide
ASWDDSLNAYV

SEQ ID NO: 382 - protein, 11 aa, Artificial Sequence
  Description of Artificial Sequence: Synthetic peptide
NSRGSGGNPYV

SEQ ID NO: 383 - protein, 11 aa, Artificial Sequence
  Description of Artificial Sequence: Synthetic peptide
AAWDDSLNGRV

SEQ ID NO: 384 - protein, 11 aa, Artificial Sequence
  Description of Artificial Sequence: Synthetic peptide
SAWDNSLSAWV

SEQ ID NO: 385 - protein, 9 aa, Artificial Sequence
  Description of Artificial Sequence: Synthetic peptide
QQYYGKPFT

SEQ ID NO: 386 - protein, 10 aa, Artificial Sequence
  Description of Artificial Sequence: Synthetic peptide
VLYMGRGIYV

SEQ ID NO: 387 - protein, 11 aa, Artificial Sequence
  Description of Artificial Sequence: Synthetic peptide
SAWDSSLSVWV

SEQ ID NO: 388 - protein, 9 aa, Artificial Sequence
  Description of Artificial Sequence: Synthetic peptide
HQTSSLPWT

SEQ ID NO: 389 - protein, 10 aa, Artificial Sequence
  Description of Artificial Sequence: Synthetic peptide
ALYVGGGISV

SEQ ID NO: 390 - protein, 11 aa, Artificial Sequence
  Description of Artificial Sequence: Synthetic peptide
AAWDDSLSGPV

SEQ ID NO: 391 - protein, 9 aa, Artificial Sequence
  Description of Artificial Sequence: Synthetic peptide
QSFDASTLV

SEQ ID NO: 392 - protein, 11 aa, Artificial Sequence
  Description of Artificial Sequence: Synthetic peptide
QSYDSSLSVVV

SEQ ID NO: 393 - protein, 11 aa, Artificial Sequence
  Description of Artificial Sequence: Synthetic peptide
SAWDSSLSAWV

SEQ ID NO: 394 - protein, 11 aa, Artificial Sequence
  Description of Artificial Sequence: Synthetic peptide
QQYFSSPPIFT

SEQ ID NO: 395 - protein, 11 aa, Artificial Sequence
  Description of Artificial Sequence: Synthetic peptide
AAWDDSLKGRV

SEQ ID NO: 396 - protein, 8 aa, Artificial Sequence
  Description of Artificial Sequence: Synthetic peptide
QSYDSSVV

SEQ ID NO: 397 - DNA, 372 bp, Artificial Sequence
  Description of Artificial Sequence: Synthetic polynucleotide
caggttcaattagtgcagtctggtgctgaagtgaaaaagcccggctcaagtgttaaagtaagctgtaaggcgagcggtggcccattcagctcatacgccattagctgggtgcgacaggctcctggtcagggcctcgaatggatgggcggcattagcccaatgtttggcactgcaaattatgcccagaaatttcagggtagagtcacaattaccgcagacaagagcacctcaaccgcctacatggaactgagtagcctgcgttccgaagatacagctgtgtattactgtgcgcgcgacgacggttacgctcctagtggtggtctgcgtgagtttgacgtttggggccaggggaccttagtcactgtgtctagc

SEQ ID NO: 398 - DNA, 340 bp, Artificial Sequence
  Description of Artificial Sequence: Synthetic polynucleotide
gacatccagatgacccagtctccagactccctggctgtgtctctgggcgagagggccaccatcaactgcaagtccagccggagtgttttatacagctccaacaacaagaactacttagcttggtaccaacaaaaaccgggacagcctcctaagttgctcatttattgggcttctacccgggaatccggggtccctgaccgattcagtggcagcgggtctgggacagatttcactctcaccatcagcagcctgcaggctgaagatgtggcggtttattactgtcagcaatattatagtggttcctggacattcggccaagggaccaaggtggaaatcaaac

SEQ ID NO: 399 - DNA, 363 bp, Artificial Sequence
  Description of Artificial Sequence: Synthetic polynucleotide
caggttcaattagtgcagtctggtgctgaagtgaaaaagcccggctcaagtgttaaagtaagctgtaaggcgagcggaggcatctttagctcatacgccattagctgggtgcgacaggctcctggtcagggcctcgaatggatgggcggcattagccctatctttggcactgcaaattatgcccagaaatttcagggtagagtcacaattaccgcagataaaagcacgaataccgcctacatggaactgagtagcctgcgttccgaagatacagctgtgtattactgtgcgcgcggtcgtggtgcttacatgggtcctagtatggatgtgtggggccaggggaccttagtcactgtgtctagc

SEQ ID NO: 400 - DNA, 325 bp, Artificial Sequence
  Description of Artificial Sequence: Synthetic polynucleotide
cagcctgtgctgactcagccaccctcggtgtcagtggccccaggacagacggccaggattacctgtgggggaaacaacattggaagtaaaagtgtgcactggtaccagcagaagccaggccaggcccctgtgctggtcgtctatgatgatagcgaccggccctcagggatccctgagcgattctctggctccaactctgggaacacggccaccctgaccatcagcagggtcgaggccggggatgaggccgactactactgtcaggtgtgggataggagtagtgatcatgtggtgttcggcggagggaccaagctgaccgtcctag

SEQ ID NO: 401 - DNA, 363 bp, Artificial Sequence
  Description of Artificial Sequence: Synthetic polynucleotide
caggttcaattagtgcagtctggtgctgaagtgaaaaagcccggctcaagtgttaaagtaagctgtaaggcgagcggaggtaccttcagctcatacgccattagctgggtgcgacaggctcctggtcagggcctcgaatggatgggcggcatcagcccaatctttggcactgcaaattatgcccagaaatttcagggtagagtcacaattaccgcagataaaagcacgtcaactgtgtatatggaactgagtagcctgcgttccgaagatacagctgtgtattactgtgcgcgcggtgctcgttactacgctggtggttacttcgatgtgtggggccaggggaccttagtcactgtgtctagc

SEQ ID NO: 402 - DNA, 325 bp, Artificial Sequence
  Description of Artificial Sequence: Synthetic polynucleotide
gaaattgtgctgactcagtctccaggcaccctgtctttgtctccaggggaaagagccaccctctcctgcagggccagtcagactgttagcaactacttagcctggtatcagcagagacctggccaggctcccaggctcctcatctacgctgcatccacgcgggccactggtgtcccagccaggttcagtggcagcgggtctgggacagagttcactctcaccatcagcagcctgcaatctgaagattttgcaatttattactgtcaacagtatgataacttgcctccggtcactttcggccctgggaccacagtggatatcaaac

SEQ ID NO: 403 - DNA, 375 bp, Artificial Sequence
  Description of Artificial Sequence: Synthetic polynucleotide
caggttcaattagtgcagtctggtgctgaagtgaaaaagcccggctcaagtgttaaagtaagctgtaaggcgagcggtgttacctttagctcatacgccattagctgggtgcgacaggctcctggtcagggcctcgaatggatgggcggcatcagcccaatcttcggtactgcaaattatgcccagaaatttcagggtagagtcacaattaccgcagatcagagtaccaacactgtctacatggaactgagtagcctgcgttccgaagatacagctgtgtattactgtgcgcgcgacagtggtaattacgacggttacggtcctggtagtcgtttcgacgtgtggggccaggggaccttagtcactgtgtctagc

SEQ ID NO: 404 - DNA, 331 bp, Artificial Sequence
  Description of Artificial Sequence: Synthetic polynucleotide
cagcctgggctgactcagccaccctcagcgtctgggacccccgggcagagggtcaccatctcttgttctggaagcagctccaacatcggaagtaatactgtaaactggtaccagcagctcccaggaacggcccccaaactcctcatctatagtaataatcagcggccctcaggggtccctgaccgattctctggctccaagtctggcacctcagcctccctggccatcagtgggctccagtctgaggatgaggctgattatttctgttcagcttgggatgacagcctgggtggcgaggtcttcggaactgggaccaaggtcaacgtcctag

SEQ ID NO: 405 - DNA, 363 bp, Artificial Sequence
  Description of Artificial Sequence: Synthetic polynucleotide
caggttcaattagtgcagtctggtgctgaagtgaaaaagcccggctcaagtgttaaagtaagctgtaaggcgagcggagtgacctttagttcttacgccattagctgggtgcgacaggctcctggtcagggcctcgaatggatgggcggcattatgcctatgttcggcactgcaaattatgcccagaaatttcagggtagagtcacaattaccgcagataagagtacgagcactgcctatatggaactgagtagcctgcgttccgaagatacagctgtgtattactgtgcgcgcgagcgtggtagttggagtttcggttactttgatgtgtggggccaggggaccttagtcactgtgtctagc

SEQ ID NO: 406 - DNA, 325 bp, Artificial Sequence
  Description of Artificial Sequence: Synthetic polynucleotide
ctgcctgtgctgactcagccaccctcgatgtcagcggccccaggacagacggccaggattacctgtgggggagaccacattggaagtaaaagtgtgcactggtaccagcggaagccgggccaggcccctgtgctggtcatctattctgacaccgaccggccctcagggatccctgagcggttctctggctccaactctgggaacacggccaccctgaccatcagcagggtcgaagccggggatgaggccgactatttctgtcaggtgtgggatagtagtaatgatcatccggtgttcggcggaggcaccaagctgaccgtcctag

SEQ ID NO: 407 - DNA, 363 bp, Artificial Sequence
  Description of Artificial Sequence: Synthetic polynucleotide
caggttcaattagtgcagtctggtgctgaagtgaaaaagcccggctcaagtgttaaagtaagctgtaaggcgagcggagtgacctttagctcttacgccattagctgggtgcgacaggctcctggtcagggcctcgaatggatgggcggcatcagccctctgtttggcactgcaaattatgcccagaaatttcagggtagagtcacaattaccgcagacaaaagtacgagcaccgtgtatatggaactgagtagcctgcgttccgaagatacagctgtgtattactgtgcgcgcagtcgtacatacgctgacggtcgtacattcgacgtgtggggccaggggaccttagtcactgtgtctagc

SEQ ID NO: 408 - DNA, 331 bp, Artificial Sequence
  Description of Artificial Sequence: Synthetic polynucleotide
cagtctgtgctgactcagccaccctccgcgtccgggtctcctggacagtcggtcaccatctcctgcactggaaccagtagtgacgttggtggttataaccatgtctcctggtaccaacagcacccaggcaaagcccccaaagtcctgatttatgacgtcagtaagcggccctcaggggtcccagatcgcttctctggctccaagtctggcaacacggcctccctgaccgtctctgggctccaggctgaggatgaggctgattattactgcacctcatatgcaggcagcaacagtttggtcttcggaactgggaccgaggtcaccgtcctag

SEQ ID NO: 409 - DNA, 372 bp, Artificial Sequence
  Description of Artificial Sequence: Synthetic polynucleotide
caggttcaattagtgcagtctggtgctgaagtgaaaaagcccggctcaagtgttaaagtaagctgtaaggcgagcggtggcactttcagttcatacgccattagctgggtgcgacaggctcctggtcagggcctcgaatggatgggcggcatcagcccaatctttggtactgcaaattatgcccagaaatttcagggtagagtcacaattaccgcagacaagagcacgagcactgcctacatggaactgagtagcctgcgttccgaagatacagctgtgtattactgtgcgcgcgagctgggttacctggctggtagtcctagtcctggtttcgattactggggccaggggaccttagtcactgtgtctagc

SEQ ID NO: 410 - DNA, 328 bp, Artificial Sequence
  Description of Artificial Sequence: Synthetic polynucleotide
cagtctgtgctgactcagccaccctccgcgtccgggtctcctggacagtcagtcaccatctcctgcactggaaccagcagtgacgttggtggttataactatgtctcctggtaccaacagcacccaggcaaagcccccaaactcatcatttatgaggtcactaagcggccctcaggggtccctgatcgcttctctggctccaagtctggcaacacggcctccctgaccgtcgctgggctccaggctgaggatgaggctgattattactgcagctcgtatgcaggcggcaagtgggtcttcggaactgggaccaaggtcaccgtcctag

SEQ ID NO: 411 - DNA, 363 bp, Artificial Sequence
  Description of Artificial Sequence: Synthetic polynucleotide
caggttcaattagtgcagtctggtgctgaagtgaaaaagcccggctcaagtgttaaagtaagctgtaaggcgagcggaggcacttttagctcttacgccattagctgggtgcgacaggctcctggtcagggcctcgaatggatgggcggcattagcccaatcttcggcactgcaaattatgcccagaaatttcagggtagagtcacaattaccgcagacaccagcacctcaaccgcctacatggaactgagtagcctgcgttccgaagatacagctgtgtattactgtgcgcgcagtcgtcgttactgggctgacggtggtttcgattattggggccaggggaccttagtcactgtgtctagc

SEQ ID NO: 412 - DNA, 331 bp, Artificial Sequence
  Description of Artificial Sequence: Synthetic polynucleotide
ctgcctgtgctgactcagccaccctcagcgtctgggacccccgggcagagggtcaccatctcttgttctggaagcagctccaacatgggaagaaataccgtcaactggtaccggcacctcccagggacggcccccgaactcctcatctatgataatgatgagcgtccctcaggggtccctgaccgattctctggctccaagtctggcacctcagcctccctggccatcagtgggctccagtctgaagatgagggtcattattactgtgctgcgtgggatgacagcctgaatggtccggtgttcggcggagggaccaagctgaccgtcctgg

SEQ ID NO: 413 - DNA, 366 bp, Artificial Sequence
  Description of Artificial Sequence: Synthetic polynucleotide
caggttcaattagtgcagtctggtgctgaagtgaaaaagcccggctcaagtgttaaagtaagctgtaaggcgagcggaggtacttttagttcttacgccattagctgggtgcgacaggctcctggtcagggcctcgaatggatgggcggcattagccctatgttcggtactgcaaattatgcccagaaatttcagggtagagtcacaattaccgcagacaaaagtaccagcactgcctacatggaactgagtagcctgcgttccgaagatacagctgtgtattactgtgcgcgcgagggtggttacagtcctggtggtgttgacttcgactactggggccaggggaccttagtcactgtgtctagc

SEQ ID NO: 414 - DNA, 331 bp, Artificial Sequence
  Description of Artificial Sequence: Synthetic polynucleotide
aattttatgctgactcagccccactctgtgtcggagtctccggggaagacggtaaccatctcctgcacccgcagcagtggcagcattgccagcacctatgtgcagtggtaccggcagcgcccgggcagtgcccccaccactgtgatctatgaggatcatcagagaccctctggggtccctgatcggttctccggctccctcgacagctcctccaactctgcctccctcaccatctctggactgaggactgaggacgcggcaacctactactgtcagtcttttgatgccagcactctggtgttcggcggcgggaccaagctgaccgtcctcg

SEQ ID NO: 415 - DNA, 363 bp, Artificial Sequence
  Description of Artificial Sequence: Synthetic polynucleotide
caggttcaattagtgcagtctggtgctgaagtgaaaaagcccggctcaagtgttaaagtaagctgtaaggcgagcggtgttacttttagttcttacgccattagctgggtgcgacaggctcctggtcagggcctcgaatggatgggcggcatcagcccaatctttggtactgcaaattatgcccagaaatttcagggtagagtcacaattaccgcagacgaaagtacgaatactgtgtatatggaactgagtagcctgcgttccgaagatacagctgtgtattactgtgcgcgcggtacaacatacagtacagctcgttacttcgacgtttggggccaggggaccttagtcactgtgtctagc

SEQ ID NO: 416 - DNA, 337 bp, Artificial Sequence
  Description of Artificial Sequence: Synthetic polynucleotide
aattttatgctgactcagccccactctgtgtcggagtctccggggaagacggtaaccatctcctgcacccgcagaagtggcagcattgccagcaactatgtgcagtggtaccagcagcgcccgggcagtgcccccaccactgtgatctatgaggataaccaaagaccctctggggtccctgatcgcttctctggctccatcgacaggtcctccaactctgcctccctcaccatctctggactgaagactgaggacgaggctgactactactgtcagtcttatgacagcgacaatcatgaagtgatattcggcggagggaccaagctgaccgtcctag

SEQ ID NO: 417 - DNA, 363 bp, Artificial Sequence
  Description of Artificial Sequence: Synthetic polynucleotide
caggttcaattagtgcagtctggtgctgaagtgaaaaagcccggctcaagtgttaaagtaagctgtaaggcgagcggagtgacttttcgttcatacgccattagctgggtgcgacaggctcctggtcagggcctcgaatggatgggcggcatcagcggtatctttggtactgcaaattatgcccagaaatttcagggtagagtcacaattaccgcagatgagagcacgtcaaccgcatatatggaactgagtagcctgcgttccgaagatacagctgtgtattactgtgcgcgcagtcctgcttactacttcggtcctaatatggacgtgtggggccaggggaccttagtcactgtgtctagc

SEQ ID NO: 418 - DNA, 334 bp, Artificial Sequence
  Description of Artificial Sequence: Synthetic polynucleotide
cagtctgtgctgactcagccaccctcagtgtctggggccccagggcagagggtcaccatctcctgcactgggagcagctccaacatcggggcaggttatgatgtacactggtaccagcaacttccaggaacagtccccaaactcatcatctatgataatagcaatcggccctcaggggtccctgcccgattctctggctccaagtctggcacctcagcctccctggccatcagtgggctccagtctgaggatgaggccgcatattattgccagtcgtatgacagcagcctgagtgttgtggtattcggcggtgggaccaagctgtccgtcctag

SEQ ID NO: 419 - DNA, 369 bp, Artificial Sequence
  Description of Artificial Sequence: Synthetic polynucleotide
caggttcaattagtgcagtctggtgctgaagtgaaaaagcccggctcaagtgttaaagtaagctgtaaggcgagcggaggcacttttagttcttacgccattagctgggtgcgacaggctcctggtcagggcctcgaatggatgggcggcatcagccctatgtttggtactgcaaattatgcccagaaatttcagggtagagtcacaattaccgcagacaaaagtacgagcactgcctacatggaactgagtagcctgcgttccgaagatacagctgtgtattactgtgcgcgcagtagtcgttacgctcctagtgacagtacaaattttgatcaatggggccaggggaccttagtcactgtgtctagc

SEQ ID NO: 420 - DNA, 334 bp, Artificial Sequence
  Description of Artificial Sequence: Synthetic polynucleotide
aattttatgctgactcagccccactctgtgtcggagtctccggggaagacggtaaccatctcctgcaccggcagcagtggcagcattgccagcaactatgtgcagtggtaccagcagcgcccgggcagtgcccccaccactgtgatctatgaggataaccaaagaccctctggggtccctgatcggttctctggctccatcgacagctcctccaactctgcctccctcaccatctctggactgaagactgaggacgaggctgactactactgtcagtcttatgataccagcaatcggaaggttttcggcggagggaccaagctgaccgtcctag

SEQ ID NO: 421 - DNA, 363 bp, Artificial Sequence
  Description of Artificial Sequence: Synthetic polynucleotide
caggttcaattagtgcagtctggtgctgaagtgaaaaagcccggctcaagtgttaaagtaagctgtaaggcgagcggtggcccatttagttcatacgccattagctgggtgcgacaggctcctggtcagggcctcgaatggatgggcggcattagcggtatctttggcactgcaaattatgcccagaaatttcagggtagagtcacaattaccgcagatgagagcacgtcaaccgcatatatggaactgagtagcctgcgttccgaagatacagctgtgtattactgtgcgcgcggtgaccgtttctacgttggtgagcgtttcgatgtgtggggccaggggaccttagtcactgtgtctagc

SEQ ID NO: 422 - DNA, 328 bp, Artificial Sequence
  Description of Artificial Sequence: Synthetic polynucleotide
cagtctgtgctgactcagccaccctcggtgtcagtggccccaggacagacggccagaattacctgtgggggaaatgacattggaagtaaaagtgtccactggtaccagcagaagccaggccaggcccctgtgctggtcgtctatgatgatatcgaccggccctcagggatccctgagcgattctctggctccaactatggggacacggccaccctgaccatcagctgggtcgaggccggggatgaggccgactattactgtcaggtgtgggatactaatagtgatcccgtctttgtcttcggaagtgggaccaaggtcaccgtccttg

SEQ ID NO: 423 - DNA, 375 bp, Artificial Sequence
  Description of Artificial Sequence: Synthetic polynucleotide
caggttcaattagtgcagtctggtgctgaagtgaaaaagcccggctcaagtgttaaagtaagctgtaaggcgagcggtggcaccttcagctcttacgccattagctgggtgcgacaggctcctggtcagggcctcgaatggatgggcggcattagcccaatcttcggtactgcaaattatgcccagaaatttcagggtagagtcacaattaccgcagaccagagcacgagcactgcctacatggaactgagtagcctgcgttccgaagatacagctgtgtattactgtgcgcgcggtggtggtgttggtcgtatctggatcgctggttacggtttcgatcagtggggccaggggaccttagtcactgtgtctagc

SEQ ID NO: 424 - DNA, 331 bp, Artificial Sequence
  Description of Artificial Sequence: Synthetic polynucleotide
cagactgtggtgactcaggagccatcgttctcagtgtcccctggagggacagttaccctcacttgtggcttgagctctggctcagtctccactagtaactaccccagctggtaccagcagaccccaggccagcctccacgcacgctcatctacagcacaaacactcgctcttctggggtccctgatcgcttctctggctccatccttgggaacaaagctgccctcaccatcacgggggcccaggcagatgatgaatctgattattactgtgtcctatatatgggtagtggcatttcgatgttcggcggagggaccaagttgaccgtcctag

SEQ ID NO: 425 - DNA, 375 bp, Artificial Sequence
  Description of Artificial Sequence: Synthetic polynucleotide
caggttcaattagtgcagtctggtgctgaagtgaaaaagcccggctcaagtgttaaagtaagctgtaaggcgagcggtggtacttttagttcatacgccattagctgggtgcgacaggctcctggtcagggcctcgaatggatgggcggcattagcccaatctttggtactgcaaattatgcccagaaatttcagggtagagtcacaattaccgcagacgaaagcaccagcactgtgtacatggaactgagtagcctgcgttccgaagatacagctgtgtattactgtgcgcgcggtcctggttaccaccctgctggtgctagtggtcaattctttgatctttggggccaggggaccttagtcactgtgtctagc

SEQ ID NO: 426 - DNA, 331 bp, Artificial Sequence
  Description of Artificial Sequence: Synthetic polynucleotide
tcctatgagctgactcagccaccctcggtgtccaaggacttgagacagaccgccacactcacctgcactgggaacagcaacaatgttggcaaccaaggagcagcttggctgcagcagcaccagggccaccctcccaaactcctatcctacaggaataaccaccggccctcagggatctcagacagatcatctgcatccaggtcaggagacacagcctccctgaccattactggactccagcctgaggacgaggctgactattactgctcagcatgggacagcagcctcagtgcttgggtgttcggcggagggaccaagctgaccgtcctag

SEQ ID NO: 427 - DNA, 369 bp, Artificial Sequence
  Description of Artificial Sequence: Synthetic polynucleotide
caggttcaattagtgcagtctggtgctgaagtgaaaaagcccggctcaagtgttaaagtaagctgtaaggcgagcggtgtgaccttcagctcatacgccattagctgggtgcgacaggctcctggtcagggcctcgaatggatgggcggcattagccctatgtttggtactgcaaattatgcccagaaatttcagggtagagtcacaattaccgcagatgaaagcaccaacaccgcctatatggaactgagtagcctgcgttccgaagatacagctgtgtattactgtgcgcgcggtcgtggttacgctcctgacgctctgacaaattttgacgtttggggccaggggaccttagtcactgtgtctagc

SEQ ID NO: 428 - DNA, 346 bp, Artificial Sequence
  Description of Artificial Sequence: Synthetic polynucleotide
gaaattgtgctgactcagtctccagactccctggctatgtctctgggcgagagggccaccgtcaactgcaagtccagccggagtcttttcgacagctccgacaataagaactacttagcttggtaccagaagaaaccaggacagcctcctcaattgctcatttactgggcatctacccgacaatccggggtccctgaccgattcagtggcagcgggtctgggacagatttcactctcaccatcagcagcctgcaggctgaagatgtggcagtttattactgtcagcaatattttagtagtcctcccatattcaccttcggccctgggaccaaagtggagatcaaac

SEQ ID NO: 429 - DNA, 366 bp, Artificial Sequence
  Description of Artificial Sequence: Synthetic polynucleotide
caggttcaattagtgcagtctggtgctgaagtgaaaaagcccggctcaagtgttaaagtaagctgtaaggcgagcggagtgacttttagctcatacgccattagctgggtgcgacaggctcctggtcagggcctcgaatggatgggcggcattacccctatgtttggtactgcaaattatgcccagaaatttcagggtagagtcacaattaccgcagataaaagtacgagcaccgtctatatggaactgagtagcctgcgttccgaagatacagctgtgtattactgtgcgcgcggtcgtggttacatcgctgttgctggtgacatggacgtgtggggccaggggaccttagtcactgtgtctagc

SEQ ID NO: 430 - DNA, 340 bp, Artificial Sequence
  Description of Artificial Sequence: Synthetic polynucleotide
gacatccagatgacccagtctccagactccctggctgtgtctctgggcgagagggccaccatcaactgcaagtccagtcggagtgttttatacagctccaacaataagaactacttagcttggtaccagcagaaagcaggacagcctcctaagctgctcatttactgggcatctacccgggaatccggggtccctgaccgattcagtggcagcgggtctgggacagatttcactctcaccatcagcagcctgcaggctgaagatgtggcagtttattactgtcagcaatattatagtactcctccgacgttcggccaagggaccaaggtggaaatcaaac

SEQ ID NO: 431 - DNA, 372 bp, Artificial Sequence
  Description of Artificial Sequence: Synthetic polynucleotide
caggttcaattagtgcagtctggtgctgaagtgaaaaagcccggctcaagtgttaaagtaagctgtaaggcgagcggtgttaccttcagttcatacgccattagctgggtgcgacaggctcctggtcagggcctcgaatggatgggcggcattagcccactgttcggtactgcaaattatgcccagaaatttcagggtagagtcacaattaccgcagataagagcacgagcactgcctacatggaactgagtagcctgcgttccgaagatacagctgtgtattactgtgcgcgcggtgacgcttactacgttggtggtggtgctcgtccttttgacctctggggccaggggaccttagtcactgtgtctagc

SEQ ID NO: 432 - DNA, 334 bp, Artificial Sequence
  Description of Artificial Sequence: Synthetic polynucleotide
tcctatgagctgactcagccaccctcagtgtctgagacccccgggcagaacgtcattatctcttgttctggaggcagctccaacatcggagttaattatgtatactggtatcaggtggtcccaggagcggcccccaaactcctcatctataggaataatcagcggccctcaggggtccctgaccgattctctggctccaagtctggcacctcagcctccctggccatcagtggactccagtctgaggatgaggctgactattactgtggagtatgggatgacagcctgaatggtcattgggtgttcggcggagggaccgacctgaccgtcctgg

SEQ ID NO: 433 - DNA, 375 bp, Artificial Sequence
  Description of Artificial Sequence: Synthetic polynucleotide
caggttcaattagtgcagtctggtgctgaagtgaaaaagcccggctcaagtgttaaagtaagctgtaaggcgagcggtggtccatttagctcatacgccattagctgggtgcgacaggctcctggtcagggcctcgaatggatgggcggcattagccctatgtttggtactgcaaattatgcccagaaatttcagggtagagtcacaattaccgcagatgaaagcacgtcaaccgtgtacatggaactgagtagcctgcgttccgaagatacagctgtgtattactgtgcgcgcggttacagttactaccctggtggtggtggtggtcgtaatttcgactactggggccaggggaccttagtcactgtgtctagc

SEQ ID NO: 434 - DNA, 331 bp, Artificial Sequence
  Description of Artificial Sequence: Synthetic polynucleotide
ctgcctgtgctgactcagccaccctcagcgtctgggacccccgggcagagggtcaccatctcttgttctggaagcagctccaacatcggaagtaatactgtaaactggtaccagcagctcccaggaacggcccccaaactcctcatctatagtaataatcagcggccctcaggggtccctgaccgattctctggctccaagtctggcacctcagcctccctggccatcagtgggctccagtctgagggtgaggctgattattactgtgcagcatgggatgacagcctgaaaggtcgggtgttcggcggagggaccaaggtgaccgtcctag

SEQ ID NO: 435 - DNA, 372 bp, Artificial Sequence
  Description of Artificial Sequence: Synthetic polynucleotide
caggttcaattagtgcagtctggtgctgaagtgaaaaagcccggctcaagtgttaaagtaagctgtaaggcgagcggaggtccattcagttcttacgccattagctgggtgcgacaggctcctggtcagggcctcgaatggatgggcggcatcagccctctgtttggtactgcaaattatgcccagaaatttcagggtagagtcacaattaccgcagatgaaagcacgtcaaccgcctacatggaactgagtagcctgcgttccgaagatacagctgtgtattactgtgcgcgcgctcctacatactacgctagtcgtgacagttacaatttcgattattggggccaggggaccttagtcactgtgtctagc

SEQ ID NO: 436 - DNA, 325 bp, Artificial Sequence
  Description of Artificial Sequence: Synthetic polynucleotide
gaaacgacactcacgcagtctccagccaccctgtctgtgtctccaggggaaagagccaccctctcctgcagggccagtcagagtgttgacagaggctacttagcctggtatcagcagaagcctggccaggctcccaggctcctcatctatggtgcatcccacagggccgctggcatcccagacaggttcagtggcagtgggtctgggacagacttcactctcaccatcagcagactggagcctgaggattttgcagtatatttctgtcagcagtatggtagttcacgcctctctttcggcggagggaccaaggtggagatccaac

SEQ ID NO: 437 - DNA, 363 bp, Artificial Sequence
  Description of Artificial Sequence: Synthetic polynucleotide
caggttcaattagtgcagtctggtgctgaagtgaaaaagcccggctcaagtgttaaagtaagctgtaaggcgagcggtgtgactttcagttcttacgccattagctgggtgcgacaggctcctggtcagggcctcgaatggatgggcggcattagccctatgttcggtactgcaaattatgcccagaaatttcagggtagagtcacaattaccgcagacaagagcacgaatactgcatatatggaactgagtagcctgcgttccgaagatacagctgtgtattactgtgcgcgcgacacaacatacatcgctggtggtcacttcgacgtttggggccaggggaccttagtcactgtgtctagc

SEQ ID NO: 438 - DNA, 331 bp, Artificial Sequence
  Description of Artificial Sequence: Synthetic polynucleotide
cagtctgtgctgactcagccaccctccgcgtccgggtctcctggacagtcagtcaccatctcctgcactggaaccagcagtgacattggtgcttataactatgtctcctggtaccaacaacacccagacaaagcccccaagctcatcatttatgaggtcagtaagcggccctcaggggtccctgatcgcttctctggctccaagtctggcaacacggcctccctgaccgtctctgggctccaggctgaggatgaggctgattattactgcagctcctatgcaggcagcaacaatgtggtattcggcggagggaccaagctgaccgtcctag

SEQ ID NO: 439 - DNA, 366 bp, Artificial Sequence
  Description of Artificial Sequence: Synthetic polynucleotide
caggttcaattagtgcagtctggtgctgaagtgaaaaagcccggctcaagtgttaaagtaagctgtaaggcgagcggtggtaccttcagctcatacgccattagctgggtgcgacaggctcctggtcagggcctcgaatggatgggcggcatcagccctctgtttggcactgcaaattatgcccagaaatttcagggtagagtcacaattaccgcagatgagagtaccaatactgcctatatggaactgagtagcctgcgttccgaagatacagctgtgtattactgtgcgcgcgctagtggttacttcacaggttggggtacattcgactactggggccaggggaccttagtcactgtgtctagc

SEQ ID NO: 440 - DNA, 319 bp, Artificial Sequence
  Description of Artificial Sequence: Synthetic polynucleotide
tcctatgagctgactcagccaccctcggtgtcagtgtccccaggacagacggccaggatcacctgctctggagatgcattgccaaagcaatatgcttattggtaccagcagaagccaggccaggcccctgtgctggtgatatataaagacagtgagaggccctcagggatccctgagcgattctctggctccaactctgggaacacagccactctgaccatcagcgggacccaggctttggatgaggctgactattactgtcaggcgtgggacagcagcactgctgtcttcggaactgggaccaaggtcaccgtcctag

SEQ ID NO: 441 - DNA, 363 bp, Artificial Sequence
  Description of Artificial Sequence: Synthetic polynucleotide
caggttcaattagtgcagtctggtgctgaagtgaaaaagcccggctcaagtgttaaagtaagctgtaaggcgagcggaggtacttttagttcttacgccattagctgggtgcgacaggctcctggtcagggcctcgaatggatgggcggcatcagccctatctttggtactgcaaattatgcccagaaatttcagggtagagtcacaattaccgcagacaagagcacgagcaccgcctacatggaactgagtagcctgcgttccgaagatacagctgtgtattactgtgcgcgcggtcgttactactacacagttggtgtttatgacgtttggggccaggggaccttagtcactgtgtctagc

SEQ ID NO: 442 - DNA, 331 bp, Artificial Sequence
  Description of Artificial Sequence: Synthetic polynucleotide
tcctatgagctgactcagccaccctcggtgtccaagggcttgagacagaccgccaccctcacctgcattggggacagcgacaatgttggcaaccaaggagtaggttggctgcagcagcaccagggccaccctcccaaactcctgtcctacagggataacacccggccctcaggcatctcagagagattctctgcatccaggtcaggaaacacagcctccctgaccattactggactccagcctgaggacgaggctgactattactgctcagcatgggacagcagcctcactgccgtggtgttcggcggagggaccaagctggccgtcctag

SEQ ID NO: 443 - DNA, 381 bp, Artificial Sequence
  Description of Artificial Sequence: Synthetic polynucleotide
caggttcaattagtgcagtctggtgctgaagtgaaaaagcccggctcaagtgttaaagtaagctgtaaggcgagcggtgttaccttcagttcttacgccattagctgggtgcgacaggctcctggtcagggcctcgaatggatgggcggcattagccctatctttggcactgcaaattatgcccagaaatttcagggtagagtcacaattaccgcagataaaagtacctcaaccgtctacatggaactgagtagcctgcgttccgaagatacagctgtgtattactgtgcgcgcggtggtggttacagtgctgacggtggtgctggtaataatacaatcttcgacgtttggggccaggggaccttagtcactgtgtctagc

SEQ ID NO: 444 - DNA, 331 bp, Artificial Sequence
  Description of Artificial Sequence: Synthetic polynucleotide
cagcctgtgctgactcagccaccctcggtgtccaagggcttgagacagaccgccacactcacctgtactgggaacaacaacaatgttggcaaccaaggagcagcctggctgcagcagcaccagggccaccctcccaaactcctatccgacaggaataacaaccggccctcagggatctcagagagattatctgcatccaggtcaggaaatacagcctccctgaccattactggactccaggctgaggacgaggctgactattactgctcagcatgggacagcagcctcagtgcttgggtgttcggcggagggaccaagctgaccgtcctaa

SEQ ID NO: 445 - DNA, 366 bp, Artificial Sequence
  Description of Artificial Sequence: Synthetic polynucleotide
caggttcaattagtgcagtctggtgctgaagtgaaaaagcccggctcaagtgttaaagtaagctgtaaggcgagcggagttacttttagctcttacgccattagctgggtgcgacaggctcctggtcagggcctcgaatggatgggcggcattagccctctgtttggtactgcaaattatgcccagaaatttcagggtagagtcacaattaccgcagatgagagtacctcaactgcatatatggaactgagtagcctgcgttccgaagatacagctgtgtattactgtgcgcgcgagcgtggttacacagttggtggtggtggtatggacgtgtggggccaggggaccttagtcactgtgtctagc

SEQ ID NO: 446 - DNA, 334 bp, Artificial Sequence
  Description of Artificial Sequence: Synthetic polynucleotide
cagtctgccctgactcagcctccctccgcgtccgggtctcctggacagtcagtcaccatctcctgcactggaaccagcagtgacgttggtgctcacaactttgtctcctggtaccaacaacacccagacaaagcccccaaactcatcatttatgaggtcaataggcggccctcaggggtccctgatcgcttctctggctccaagtctggcacctcagcctccctggccatcagtggtctccagtctgacgatgaggctgactattactgtgcagcatgggacgacagtctcgatggtccggtgttcggcggagggaccaagctgaccgtcctag

SEQ ID NO: 447 - DNA, 372 bp, Artificial Sequence
  Description of Artificial Sequence: Synthetic polynucleotide
caggttcaattagtgcagtctggtgctgaagtgaaaaagcccggctcaagtgttaaagtaagctgtaaggcgagcggagttacttttagctcatacgccattagctgggtgcgacaggctcctggtcagggcctcgaatggatgggcggcatcagcccaatctttggtactgcaaattatgcccagaaatttcagggtagagtcacaattaccgcagacaagagcacgaacactgtgtacatggaactgagtagcctgcgttccgaagatacagctgtgtattactgtgcgcgcgagtacctgggtgacgactacagtagtggtagttacttcgatgtgtggggccaggggaccttagtcactgtgtctagc

SEQ ID NO: 448 - DNA, 322 bp, Artificial Sequence
  Description of Artificial Sequence: Synthetic polynucleotide
gaaacgacactcacgcagtctccaggcacactgtctttgtctccaggggaaacagccatcctctcctgtagggccagtcagagtgttgatagtcacttagcctggtaccaacaaaaaggtggccaggctcccaggctcctcatctatggtgcatccaccagggccactggtatcccagccaggttcagtggcagtgggtctgggacagacttcactctcaccatcaatggcctagagcctgaggattttgcaatttatttctgtcagcagcgcagcatgtggcccctcactttcggcggagggaccaaggtggagatcaaac

SEQ ID NO: 449 - DNA, 363 bp, Artificial Sequence
  Description of Artificial Sequence: Synthetic polynucleotide
caggttcaattagtgcagtctggtgctgaagtgaaaaagcccggctcaagtgttaaagtaagctgtaaggcgagcggaggtactttcagttcatacgccattagctgggtgcgacaggctcctggtcagggcctcgaatggatgggcggcattagccctatgtttggtactgcaaattatgcccagaaatttcagggtagagtcacaattaccgcagacaaaagtacctcaactgcatatatggaactgagtagcctgcgttccgaagatacagctgtgtattactgtgcgcgcgagagtggttacagtggtacaggtcaatttgacgtgtggggccaggggaccttagtcactgtgtctagc

SEQ ID NO: 450 - DNA, 331 bp, Artificial Sequence
  Description of Artificial Sequence: Synthetic polynucleotide
cagtctgtgctgactcagccaccctcagcgtctgggaccgccgggcagagggtcacaatctcctgttttgggagaacctccaacgtcggacgaaacactgttaactggtaccaacaattgcccggagcggcccccaagatcctcatttttaacgataatcaacggccctcgggggtccctgaccgcttctctggctccaagtctggcaccgccgcctccctgaccataagtaggctccagtccgcggatgaggctgattactattgttcatcatgggatgacgacctgaacggtccggtcttcggcggagggaccaagctgagcgtcgtag

SEQ ID NO: 451 - DNA, 366 bp, Artificial Sequence
  Description of Artificial Sequence: Synthetic polynucleotide
caggttcaattagtgcagtctggtgctgaagtgaaaaagcccggctcaagtgttaaagtaagctgtaaggcgagcggaggtatctttagttcttacgccattagctgggtgcgacaggctcctggtcagggcctcgaatggatgggcggcattagcccaatcttcggtactgcaaattatgcccagaaatttcagggtagagtcacaattaccgcagatgagagcacgaacaccgcctatatggaactgagtagcctgcgttccgaagatacagctgtgtattactgtgcgcgcagtggtggttactacgactacggtgttggttacgaccaatggggccaggggaccttagtcactgtgtctagc

SEQ ID NO: 452 - DNA, 322 bp, Artificial Sequence
  Description of Artificial Sequence: Synthetic polynucleotide
cagcctgtgctgactcagccaccctcagcgtctgggacccccgggcagagggtcaccatctcttgttctggaggcaggtccaacatcggaagtaatactgttaactggtaccagcagctcccaggaacggcccccaaactcctcatctatagtaataatcaccggccctcaggggtccctgatcgcttctctggctccaagtctggcaacacggcctccctgaccatctctgggctccaggcggaggatgaggctgattattactgccagtcctatgacagcagcgttgtattcggcggagggaccaagctgaccgtcctag

SEQ ID NO: 453 - DNA, 366 bp, Artificial Sequence
  Description of Artificial Sequence: Synthetic polynucleotide
caggttcaattagtgcagtctggtgctgaagtgaaaaagcccggctcaagtgttaaagtaagctgtaaggcgagcggtggtaccttcagctcttacgccattagctgggtgcgacaggctcctggtcagggcctcgaatggatgggcggcattacccctatctttggcactgcaaattatgcccagaaatttcagggtagagtcacaattaccgcagacgagagtaccagcactgcctacatggaactgagtagcctgcgttccgaagatacagctgtgtattactgtgcgcgcagtggtggttacagtcctagtatcggtggtttcgacgtttggggccaggggaccttagtcactgtgtctagc

SEQ ID NO: 454 - DNA, 331 bp, Artificial Sequence
  Description of Artificial Sequence: Synthetic polynucleotide
cagcctgggctgactcagccaccctcagcgtctgggacccccgggcagagggtcaccatctcttgttctggaagcaggtccaatatcggaagaaatactgtaaactggtaccagcaactcccaggaacggcccccaaactcctcatctatagtaacaatcagcggccctcaggggtccctgaccgagtctctggctccaagtctggcacctcagcctccctggccatcagtgggctccagtctgaggatgaggctgattattactgtgcagcatgggatgtgagcctgaatggtcaggtcttcggaactgggaccaaggtcaccgtcctag

SEQ ID NO: 455 - DNA, 369 bp, Artificial Sequence
  Description of Artificial Sequence: Synthetic polynucleotide
caggttcaattagtgcagtctggtgctgaagtgaaaaagcccggctcaagtgttaaagtaagctgtaaggcgagcggaggtacctttagttcatacgccattagctgggtgcgacaggctcctggtcagggcctcgaatggatgggcggcatcagcccaatctttggtactgcaaattatgcccagaaatttcagggtagagtcacaattaccgcagatcgcagtacgagcaccgcctacatggaactgagtagcctgcgttccgaagatacagctgtgtattactgtgcgcgcggtcctggttacgaccctagtagtctgcgtggttttgacgtttggggccaggggaccttagtcactgtgtctagc

SEQ ID NO: 456 - DNA, 330 bp, Artificial Sequence
  Description of Artificial Sequence: Synthetic polynucleotide
tcctatgagctgactcagccaccctcggtgtccaaggacttgagacagaccgccacactcacctgcactgggaacagcaacaatgttggcaaccaaggagcagcttggctgcagcagcaccagggccaccctcccaaactcctattctacaagaataacaaccggccctcagggatttcagagagattatctgcatccaggtcaggaaacacagcctccctgaccattactggactccagcctgaggacgaggctgactattactgctcagcatgggacagcagcctcagtgattgggtgttcggcggagggaccaagctgaccgtccta

SEQ ID NO: 457 - DNA, 351 bp, Artificial Sequence
  Description of Artificial Sequence: Synthetic polynucleotide
caggttcaattagtgcagtctggtgctgaagtgaaaaagcccggctcaagtgttaaagtaagctgtaaggcgagcggtggcacttttagctcttacgccattagctgggtgcgacaggctcctggtcagggcctcgaatggatgggcggcatcattccaatctttggtactgcaaattatgcccagaaatttcagggtagagtcacaattaccgcagatgagagcacgaatactgcctacatggaactgagtagcctgcgttccgaagatacagctgtgtattactgtgcgcgcggtgaggaggcttactacgacctttggggccaggggaccttagtcactgtgtctagc

SEQ ID NO: 458 - DNA, 322 bp, Artificial Sequence
  Description of Artificial Sequence: Synthetic polynucleotide
gaaattgtgttgacgcagtctccaggcaccctgtctttgtctccaggggaaagagccaccctctcctgctgggccagtcagagtgttagcagcttcttagcctggtaccaacacaaacctggccaggttcccaggctcctcatctatgatgcatccaatagggccactggcatcccagccaggttctctggcagtgggtctgggacacacttcactctcactatcagcagcctagagcctgaagattttgcagtttattactgtcagcagcgtttcaattggcctccgacgttcggccaagggaccaaggtggaaagcaaac

SEQ ID NO: 459 - DNA, 366 bp, Artificial Sequence
  Description of Artificial Sequence: Synthetic polynucleotide
caggttcaattagtgcagtctggtgctgaagtgaaaaagcccggctcaagtgttaaagtaagctgtaaggcgagcggaggtacttttagttcatacgccattagctgggtgcgacaggctcctggtcagggcctcgaatggatgggcggcatcacccctatgttcggcactgcaaattatgcccagaaatttcagggtagagtcacaattaccgcagacaaaagtacgagcaccgcctatatggaactgagtagcctgcgttccgaagatacagctgtgtattactgtgcgcgcggtacaagttacctgcctggtcgtagtggttttgatgtttggggccaggggaccttagtcactgtgtctagc

SEQ ID NO: 460 - DNA, 322 bp, Artificial Sequence
  Description of Artificial Sequence: Synthetic polynucleotide
cagcctgggctgactcagccaccctcggtgtcagtgtccccaggacagacggccaggatcacctgctctgcagatgcattgccaaagcaatatgcttattggtaccagcagaggccaggccaggcccctgtgttgctgatatataaagacactgagaggcccccagggatccctgagcgattctctggctccagctcagggacaacagtcacgttgaccatcagtggagtccaggcagaagacgaggctgactactattgtcaatcagcagacgctagtgaaaattctgtcttcggaggtgggaccaaggtcaccgtcctag

SEQ ID NO: 461 - DNA, 366 bp, Artificial Sequence
  Description of Artificial Sequence: Synthetic polynucleotide
caggttcaattagtgcagtctggtgctgaagtgaaaaagcccggctcaagtgttaaagtaagctgtaaggcgagcggtgttacttttcgttcatacgccattagctgggtgcgacaggctcctggtcagggcctcgaatggatgggcggcatcagcgcaatgtttggtactgcaaattatgcccagaaatttcagggtagagtcacaattaccgcagacaagagtacgaacaccgcatatatggaactgagtagcctgcgttccgaagatacagctgtgtattactgtgcgcgcggtcgtggttacgaccctagtgttggtggttttgatgtgtggggccaggggaccttagtcactgtgtctagc

SEQ ID NO: 462 - DNA, 331 bp, Artificial Sequence
  Description of Artificial Sequence: Synthetic polynucleotide
aattttatgctgactcagccccactctgtgtcggagtctccggggaagacggtcagcatctcctgcaccggcagcagtggcagcattgccagcaactatgtgcagtggtaccagcagcgcccgggcagtgcccccgccactgtgatctatgaggataaccaaagaccctctggggtccctgatcggttctctggctccatcgacagctcctccaactctgcctccctcaccatctctggactgaagactgaggacgaggctgactactactgtcagtcttatgataccagcaatctggtattcggcgtagggaccaagctgaccgtcctag

SEQ ID NO: 463 - DNA, 381 bp, Artificial Sequence
  Description of Artificial Sequence: Synthetic polynucleotide
caggttcaattagtgcagtctggtgctgaagtgaaaaagcccggctcaagtgttaaagtaagctgtaaggcgagcggtggtacctttagttcatacgccattagctgggtgcgacaggctcctggtcagggcctcgaatggatgggcggcattattcctatcttcggtactgcaaattatgcccagaaatttcagggtagagtcacaattaccgcagacgatagcacgtcaaccgcatacatggaactgagtagcctgcgttccgaagatacagctgtgtattactgtgcgcgcgacagtacacctagtgttacaagtagtctgtaccgtatccctgcttttgatgtgtggggccaggggaccttagtcactgtgtctagc

SEQ ID NO: 464 - DNA, 337 bp, Artificial Sequence
  Description of Artificial Sequence: Synthetic polynucleotide
ctgcctgtgctgactcaatcatcctctgcctctgcttccctgggatcctcggtcaagctcacctgcagtctgaccaatgggcccagtaactacatcatcgcatggcatcagcagcagccagagaagggccctcggtacttgatgaagcttaacagtgatggcagccacagcaagggggacgggatccctgatcgcttctcaggctccagctctggggctgagcgctacctcaccatctccaaccttaagtctgaggatgaggctgattattactgtgagacctgggacagtaacactcatgtggtattcggcggagggaccaagctgaccgtcctag

SEQ ID NO: 465 - DNA, 366 bp, Artificial Sequence
  Description of Artificial Sequence: Synthetic polynucleotide
caggttcaattagtgcagtctggtgctgaagtgaaaaagcccggctcaagtgttaaagtaagctgtaaggcgagcggaggtacctttagttcatacgccattagctgggtgcgacaggctcctggtcagggcctcgaatggatgggcggcattaccccaatgtttggtactgcaaattatgcccagaaatttcagggtagagtcacaattaccgcagacaagagcacgtcaactacatacatggaactgagtagcctgcgttccgaagatacagctgtgtattactgtgcgcgcggtcctggttactaccctgacagtaataattatgatctctggggccaggggaccttagtcactgtgtctagc

SEQ ID NO: 466 - DNA, 325 bp, Artificial Sequence
  Description of Artificial Sequence: Synthetic polynucleotide
gaaacgacactcacgcagtctccaggcaccctgtctttgtctccaggggaaagagccaccctctcctgcagggccagtcagagtgttagtagcagctacttagcctggtaccagcagaaacctggccaggctcccaggctcctcatctatggtgcatcaagtagggccactggcatcccagacaggttcagtggcagtgggtctgggacagacttcactctcaccatcagcagactggagcctgaagattttgcaacctactattgtcaacaggttaacagcttccctcgaacttttggccaggggaccaagctggagatgaaac

SEQ ID NO: 467 - DNA, 366 bp, Artificial Sequence
  Description of Artificial Sequence: Synthetic polynucleotide
caggttcaattagtgcagtctggtgctgaagtgaaaaagcccggctcaagtgttaaagtaagctgtaaggcgagcggtgtgacctttagctcatacgccattagctgggtgcgacaggctcctggtcagggcctcgaatggatgggcggcattagcccaatgtttggcactgcaaattatgcccagaaatttcagggtagagtcacaattaccgcagaccagagcacgaacaccgcctatatggaactgagtagcctgcgttccgaagatacagctgtgtattactgtgcgcgcggtggtacatacagtcctggtggtacatactttgatgtttggggccaggggaccttagtcactgtgtctagc

SEQ ID NO: 468 - DNA, 331 bp, Artificial Sequence
  Description of Artificial Sequence: Synthetic polynucleotide
cagcctgtgctgactcagccaccctcagcgtctgcgacccccggacagacggtgaccatctcttgttctggcagcagttccaacatcggcgtgagctttgtctactggtatcaacaatttccaggaacggcccccaagctcctcatttacagggatgatatgaggcagtcaggggtccctgaccgattttctggcttcaagtctggctcctcagcctccctgaccatctctgggctccagtccgaagatgaggccacttattattgttccgcgtgggatgagagcctgagtagtgtgttgttcggcggagggaccaaggtcaccgtcctag

SEQ ID NO: 469 - protein, 124 aa, Artificial Sequence
  Description of Artificial Sequence: Synthetic polypeptide
QVQLVQSGAEVKKPGSSVKVSCKASGGPFSSYAISWVRQAPGQGLEWMGGISPMFGTANYAQKFQGRVTITADKSTSTAYMELSSLRSEDTAVYYCARDDGYAPSGGLREFDVWGQGTLVTVSS

SEQ ID NO: 470 - protein, 113 aa, Artificial Sequence
  Description of Artificial Sequence: Synthetic polypeptide
DIQMTQSPDSLAVSLGERATINCKSSRSVLYSSNNKNYLAWYQQKPGQPPKLLIYWASTRESGVPDRFSGSGSGTDFTLTISSLQAEDVAVYYCQQYYSGSWTFGQGTKVEIK

SEQ ID NO: 471 - protein, 121 aa, Artificial Sequence
  Description of Artificial Sequence: Synthetic polypeptide
QVQLVQSGAEVKKPGSSVKVSCKASGGIFSSYAISWVRQAPGQGLEWMGGISPIFGTANYAQKFQGRVTITADKSTNTAYMELSSLRSEDTAVYYCARGRGAYMGPSMDVWGQGTLVTVSS

SEQ ID NO: 472 - protein, 108 aa, Artificial Sequence
  Description of Artificial Sequence: Synthetic polypeptide
QPVLTQPPSVSVAPGQTARITCGGNNIGSKSVHWYQQKPGQAPVLVVYDDSDRPSGIPERFSGSNSGNTATLTISRVEAGDEADYYCQVWDRSSDHVVFGGGTKLTVL

SEQ ID NO: 473 - protein, 121 aa, Artificial Sequence
  Description of Artificial Sequence: Synthetic polypeptide
QVQLVQSGAEVKKPGSSVKVSCKASGGTFSSYAISWVRQAPGQGLEWMGGISPIFGTANYAQKFQGRVTITADKSTSTVYMELSSLRSEDTAVYYCARGARYYAGGYFDVWGQGTLVTVSS

SEQ ID NO: 474 - protein, 108 aa, Artificial Sequence
  Description of Artificial Sequence: Synthetic polypeptide
EIVLTQSPGTLSLSPGERATLSCRASQTVSNYLAWYQQRPGQAPRLLIYAASTRATGVPARFSGSGSGTEFTLTISSLQSEDFAIYYCQQYDNLPPVTFGPGTTVDIK

SEQ ID NO: 475 - protein, 125 aa, Artificial Sequence
  Description of Artificial Sequence: Synthetic polypeptide
QVQLVQSGAEVKKPGSSVKVSCKASGVTFSSYAISWVRQAPGQGLEWMGGISPIFGTANYAQKFQGRVTITADQSTNTVYMELSSLRSEDTAVYYCARDSGNYDGYGPGSRFDVWGQGTLVTVSS

SEQ ID NO: 476 - protein, 110 aa, Artificial Sequence
  Description of Artificial Sequence: Synthetic polypeptide
QPGLTQPPSASGTPGQRVTISCSGSSSNIGSNTVNWYQQLPGTAPKLLIYSNNQRPSGVPDRFSGSKSGTSASLAISGLQSEDEADYFCSAWDDSLGGEVFGTGTKVNVL

SEQ ID NO: 477 - protein, 121 aa, Artificial Sequence
  Description of Artificial Sequence: Synthetic polypeptide
QVQLVQSGAEVKKPGSSVKVSCKASGVTFSSYAISWVRQAPGQGLEWMGGIMPMFGTANYAQKFQGRVTITADKSTSTAYMELSSLRSEDTAVYYCARERGSWSFGYFDVWGQGTLVTVSS

SEQ ID NO: 478 - protein, 108 aa, Artificial Sequence
  Description of Artificial Sequence: Synthetic polypeptide
LPVLTQPPSMSAAPGQTARITCGGDHIGSKSVHWYQRKPGQAPVLVIYSDTDRPSGIPERFSGSNSGNTATLTISRVEAGDEADYFCQVWDSSNDHPVFGGGTKLTVL

SEQ ID NO: 479 - protein, 121 aa, Artificial Sequence
  Description of Artificial Sequence: Synthetic polypeptide
QVQLVQSGAEVKKPGSSVKVSCKASGVTFSSYAISWVRQAPGQGLEWMGGISPLFGTANYAQKFQGRVTITADKSTSTVYMELSSLRSEDTAVYYCARSRTYADGRTFDVWGQGTLVTVSS

SEQ ID NO: 480 - protein, 121 aa, Artificial Sequence; identical to SEQ ID NO: 479
  Description of Artificial Sequence: Synthetic polypeptide

SEQ ID NO: 481 - protein, 124 aa, Artificial Sequence
  Description of Artificial Sequence: Synthetic polypeptide
QVQLVQSGAEVKKPGSSVKVSCKASGGTFSSYAISWVRQAPGQGLEWMGGISPIFGTANYAQKFQGRVTITADKSTSTAYMELSSLRSEDTAVYYCARELGYLAGSPSPGFDYWGQGTLVTVSS

SEQ ID NO: 482 - protein, 109 aa, Artificial Sequence
  Description of Artificial Sequence: Synthetic polypeptide
QSVLTQPPSASGSPGQSVTISCTGTSSDVGGYNYVSWYQQHPGKAPKLIIYEVTKRPSGVPDRFSGSKSGNTASLTVAGLQAEDEADYYCSSYAGGKWVFGTGTKVTVL

SEQ ID NO: 483 - protein, 121 aa, Artificial Sequence
  Description of Artificial Sequence: Synthetic polypeptide
QVQLVQSGAEVKKPGSSVKVSCKASGGTFSSYAISWVRQAPGQGLEWMGGISPIFGTANYAQKFQGRVTITADTSTSTAYMELSSLRSEDTAVYYCARSRRYWADGGFDYWGQGTLVTVSS

SEQ ID NO: 484 - protein, 110 aa, Artificial Sequence
  Description of Artificial Sequence: Synthetic polypeptide
LPVLTQPPSASGTPGQRVTISCSGSSSNMGRNTVNWYRHLPGTAPELLIYDNDERPSGVPDRFSGSKSGTSASLAISGLQSEDEGHYYCAAWDDSLNGPVFGGGTKLTVL

SEQ ID NO: 485 - protein, 122 aa, Artificial Sequence
  Description of Artificial Sequence: Synthetic polypeptide
QVQLVQSGAEVKKPGSSVKVSCKASGGTFSSYAISWVRQAPGQGLEWMGGISPMFGTANYAQKFQGRVTITADKSTSTAYMELSSLRSEDTAVYYCAREGGYSPGGVDFDYWGQGTLVTVSS

SEQ ID NO: 486 - protein, 110 aa, Artificial Sequence
  Description of Artificial Sequence: Synthetic polypeptide
NFMLTQPHSVSESPGKTVTISCTRSSGSIASTYVQWYRQRPGSAPTTVIYEDHQRPSGVPDRFSGSLDSSSNSASLTISGLRTEDAATYYCQSFDASTLVFGGGTKLTVL

SEQ ID NO: 487 - protein, 121 aa, Artificial Sequence
  Description of Artificial Sequence: Synthetic polypeptide
QVQLVQSGAEVKKPGSSVKVSCKASGVTFSSYAISWVRQAPGQGLEWMGGISPIFGTANYAQKFQGRVTITADESTNTVYMELSSLRSEDTAVYYCARGTTYSTARYFDVWGQGTLVTVSS

SEQ ID NO: 488 - protein, 112 aa, Artificial Sequence
  Description of Artificial Sequence: Synthetic polypeptide
NFMLTQPHSVSESPGKTVTISCTRRSGSIASNYVQWYQQRPGSAPTTVIYEDNQRPSGVPDRFSGSIDRSSNSASLTISGLKTEDEADYYCQSYDSDNHEVIFGGGTKLTVL

SEQ ID NO: 489 - protein, 121 aa, Artificial Sequence
  Description of Artificial Sequence: Synthetic polypeptide
QVQLVQSGAEVKKPGSSVKVSCKASGVTFRSYAISWVRQAPGQGLEWMGGISGIFGTANYAQKFQGRVTITADESTSTAYMELSSLRSEDTAVYYCARSPAYYFGPNMDVWGQGTLVTVSS

SEQ ID NO: 490 - protein, 111 aa, Artificial Sequence
  Description of Artificial Sequence: Synthetic polypeptide
QSVLTQPPSVSGAPGQRVTISCTGSSSNIGAGYDVHWYQQLPGTVPKLIIYDNSNRPSGVPARFSGSKSGTSASLAISGLQSEDEAAYYCQSYDSSLSVVVFGGGTKLSVL

SEQ ID NO: 491 - protein, 123 aa, Artificial Sequence
  Description of Artificial Sequence: Synthetic polypeptide
QVQLVQSGAEVKKPGSSVKVSCKASGGTFSSYAISWVRQAPGQGLEWMGGISPMFGTANYAQKFQGRVTITADKSTSTAYMELSSLRSEDTAVYYCARSSRYAPSDSTNFDQWGQGTLVTVSS

SEQ ID NO: 492 - protein, 111 aa, Artificial Sequence
  Description of Artificial Sequence: Synthetic polypeptide
NFMLTQPHSVSESPGKTVTISCTGSSGSIASNYVQWYQQRPGSAPTTVIYEDNQRPSGVPDRFSGSIDSSSNSASLTISGLKTEDEADYYCQSYDTSNRKVFGGGTKLTVL

SEQ ID NO: 493 - protein, 121 aa, Artificial Sequence
  Description of Artificial Sequence: Synthetic polypeptide
QVQLVQSGAEVKKPGSSVKVSCKASGGPFSSYAISWVRQAPGQGLEWMGGISGIFGTANYAQKFQGRVTITADESTSTAYMELSSLRSEDTAVYYCARGDRFYVGERFDVWGQGTLVTVSS

SEQ ID NO: 494 - protein, 109 aa, Artificial Sequence
  Description of Artificial Sequence: Synthetic polypeptide
QSVLTQPPSVSVAPGQTARITCGGNDIGSKSVHWYQQKPGQAPVLVVYDDIDRPSGIPERFSGSNYGDTATLTISWVEAGDEADYYCQVWDTNSDPVFVFGSGTKVTVL

SEQ ID NO: 495 - protein, 125 aa, Artificial Sequence
  Description of Artificial Sequence: Synthetic polypeptide
QVQLVQSGAEVKKPGSSVKVSCKASGGTFSSYAISWVRQAPGQGLEWMGGISPIFGTANYAQKFQGRVTITADQSTSTAYMELSSLRSEDTAVYYCARGGGVGRIWIAGYGFDQWGQGTLVTVSS

SEQ ID NO: 496 - protein, 110 aa, Artificial Sequence
  Description of Artificial Sequence: Synthetic polypeptide
QTVVTQEPSFSVSPGGTVTLTCGLSSGSVSTSNYPSWYQQTPGQPPRTLIYSTNTRSSGVPDRFSGSILGNKAALTITGAQADDESDYYCVLYMGSGISMFGGGTKLTVL

SEQ ID NO: 497 - protein, 125 aa, Artificial Sequence
  Description of Artificial Sequence: Synthetic polypeptide
QVQLVQSGAEVKKPGSSVKVSCKASGGTFSSYAISWVRQAPGQGLEWMGGISPIFGTANYAQKFQGRVTITADESTSTVYMELSSLRSEDTAVYYCARGPGYHPAGASGQFFDLWGQGTLVTVSS

SEQ ID NO: 498 - protein, 110 aa, Artificial Sequence
  Description of Artificial Sequence: Synthetic polypeptide
SYELTQPPSVSKDLRQTATLTCTGNSNNVGNQGAAWLQQHQGHPPKLLSYRNNHRPSGISDRSSASRSGDTASLTITGLQPEDEADYYCSAWDSSLSAWVFGGGTKLTVL

SEQ ID NO: 499 - protein, 123 aa, Artificial Sequence
  Description of Artificial Sequence: Synthetic polypeptide
QVQLVQSGAEVKKPGSSVKVSCKASGVTFSSYAISWVRQAPGQGLEWMGGISPMFGTANYAQKFQGRVTITADESTNTAYMELSSLRSEDTAVYYCARGRGYAPDALTNFDVWGQGTLVTVSS

SEQ ID NO: 500 - protein, 115 aa, Artificial Sequence
  Description of Artificial Sequence: Synthetic polypeptide
EIVLTQSPDSLAMSLGERATVNCKSSRSLFDSSDNKNYLAWYQKKPGQPPQLLIYWASTRQSGVPDRFSGSGSGTDFTLTISSLQAEDVAVYYCQQYFSSPPIFTFGPGTKVEIK

SEQ ID NO: 501 - protein, 122 aa, Artificial Sequence
  Description of Artificial Sequence: Synthetic polypeptide
QVQLVQSGAEVKKPGSSVKVSCKASGVTFSSYAISWVRQAPGQGLEWMGGITPMFGTANYAQKFQGRVTITADKSTSTVYMELSSLRSEDTAVYYCARGRGYIAVAGDMDVWGQGTLVTVSS

SEQ ID NO: 502 - protein, 113 aa, Artificial Sequence
  Description of Artificial Sequence: Synthetic polypeptide
DIQMTQSPDSLAVSLGERATINCKSSRSVLYSSNNKNYLAWYQQKAGQPPKLLIYWASTRESGVPDRFSGSGSGTDFTLTISSLQAEDVAVYYCQQYYSTPPTFGQGTKVEIK

SEQ ID NO: 503 - protein, 124 aa, Artificial Sequence
  Description of Artificial Sequence: Synthetic polypeptide
QVQLVQSGAEVKKPGSSVKVSCKASGVTFSSYAISWVRQAPGQGLEWMGGISPLFGTANYAQKFQGRVTITADKSTSTAYMELSSLRSEDTAVYYCARGDAYYVGGGARPFDLWGQGTLVTVSS

SEQ ID NO: 504 - protein, 111 aa, Artificial Sequence
  Description of Artificial Sequence: Synthetic polypeptide
SYELTQPPSVSETPGQNVIISCSGGSSNIGVNYVYWYQVVPGAAPKLLIYRNNQRPSGVPDRFSGSKSGTSASLAISGLQSEDEADYYCGVWDDSLNGHWVFGGGTDLTVL

SEQ ID NO: 505 - protein, 125 aa, Artificial Sequence
  Description of Artificial Sequence: Synthetic polypeptide
QVQLVQSGAEVKKPGSSVKVSCKASGGPFSSYAISWVRQAPGQGLEWMGGISPMFGTANYAQKFQGRVTITADESTSTVYMELSSLRSEDTAVYYCARGYSYYPGGGGGRNFDYWGQGTLVTVSS

SEQ ID NO: 506 - protein, 110 aa, Artificial Sequence
  Description of Artificial Sequence: Synthetic polypeptide
LPVLTQPPSASGTPGQRVTISCSGSSSNIGSNTVNWYQQLPGTAPKLLIYSNNQRPSGVPDRFSGSKSGTSASLAISGLQSEGEADYYCAAWDDSLKGRVFGGGTKVTVL

SEQ ID NO: 507 - protein, 124 aa, Artificial Sequence
  Description of Artificial Sequence: Synthetic polypeptide
QVQLVQSGAEVKKPGSSVKVSCKASGGPFSSYAISWVRQAPGQGLEWMGGISPLFGTANYAQKFQGRVTITADESTSTAYMELSSLRSEDTAVYYCARAPTYYASRDSYNFDYWGQGTLVTVSS

SEQ ID NO: 508 - protein, 108 aa, Artificial Sequence
  Description of Artificial Sequence: Synthetic polypeptide
ETTLTQSPATLSVSPGERATLSCRASQSVDRGYLAWYQQKPGQAPRLLIYGASHRAAGIPDRFSGSGSGTDFTLTISRLEPEDFAVYFCQQYGSSRLSFGGGTKVEIQ

SEQ ID NO: 509 - protein, 121 aa, Artificial Sequence
  Description of Artificial Sequence: Synthetic polypeptide
QVQLVQSGAEVKKPGSSVKVSCKASGVTFSSYAISWVRQAPGQGLEWMGGISPMFGTANYAQKFQGRVTITADKSTNTAYMELSSLRSEDTAVYYCARDTTYIAGGHFDVWGQGTLVTVSS

SEQ ID NO: 510 - protein, 110 aa, Artificial Sequence
  Description of Artificial Sequence: Synthetic polypeptide
QSVLTQPPSASGSPGQSVTISCTGTSSDIGAYNYVSWYQQHPDKAPKLIIYEVSKRPSGVPDRFSGSKSGNTASLTVSGLQAEDEADYYCSSYAGSNNVVFGGGTKLTVL

SEQ ID NO: 511 - protein, 122 aa, Artificial Sequence
  Description of Artificial Sequence: Synthetic polypeptide
QVQLVQSGAEVKKPGSSVKVSCKASGGTFSSYAISWVRQAPGQGLEWMGGISPLFGTANYAQKFQGRVTITADESTNTAYMELSSLRSEDTAVYYCARASGYFTGWGTFDYWGQGTLVTVSS

SEQ ID NO: 512 - protein, 106 aa, Artificial Sequence
  Description of Artificial Sequence: Synthetic polypeptide
SYELTQPPSVSVSPGQTARITCSGDALPKQYAYWYQQKPGQAPVLVIYKDSERPSGIPERFSGSNSGNTATLTISGTQALDEADYYCQAWDSSTAVFGTGTKVTVL

SEQ ID NO: 513 - protein, 121 aa, Artificial Sequence
  Description of Artificial Sequence: Synthetic polypeptide
QVQLVQSGAEVKKPGSSVKVSCKASGGTFSSYAISWVRQAPGQGLEWMGGISPIFGTANYAQKFQGRVTITADKSTSTAYMELSSLRSEDTAVYYCARGRYYYTVGVYDVWGQGTLVTVSS

SEQ ID NO: 514 - protein, 110 aa, Artificial Sequence
  Description of Artificial Sequence: Synthetic polypeptide
SYELTQPPSVSKGLRQTATLTCIGDSDNVGNQGVGWLQQHQGHPPKLLSYRDNTRPSGISERFSASRSGNTASLTITGLQPEDEADYYCSAWDSSLTAVVFGGGTKLAVL

SEQ ID NO: 515 - protein, 127 aa, Artificial Sequence
  Description of Artificial Sequence: Synthetic polypeptide
QVQLVQSGAEVKKPGSSVKVSCKASGVTFSSYAISWVRQAPGQGLEWMGGISPIFGTANYAQKFQGRVTITADKSTSTVYMELSSLRSEDTAVYYCARGGGYSADGGAGNNTIFDVWGQGTLVTVSS

SEQ ID NO: 516 - protein, 110 aa, Artificial Sequence
  Description of Artificial Sequence: Synthetic polypeptide
QPVLTQPPSVSKGLRQTATLTCTGNNNNVGNQGAAWLQQHQGHPPKLLSDRNNNRPSGISERLSASRSGNTASLTITGLQAEDEADYYCSAWDSSLSAWVFGGGTKLTVL

SEQ ID NO: 517 - protein, 122 aa, Artificial Sequence
  Description of Artificial Sequence: Synthetic polypeptide
QVQLVQSGAEVKKPGSSVKVSCKASGVTFSSYAISWVRQAPGQGLEWMGGISPLFGTANYAQKFQGRVTITADESTSTAYMELSSLRSEDTAVYYCARERGYTVGGGGMDVWGQGTLVTVSS

SEQ ID NO: 518 - protein, 111 aa, Artificial Sequence
  Description of Artificial Sequence: Synthetic polypeptide
QSALTQPPSASGSPGQSVTISCTGTSSDVGAHNFVSWYQQHPDKAPKLIIYEVNRRPSGVPDRFSGSKSGTSASLAISGLQSDDEADYYCAAWDDSLDGPVFGGGTKLTVL

SEQ ID NO: 519 - protein, 124 aa, Artificial Sequence
  Description of Artificial Sequence: Synthetic polypeptide
QVQLVQSGAEVKKPGSSVKVSCKASGVTFSSYAISWVRQAPGQGLEWMGGISPIFGTANYAQKFQGRVTITADKSTNTVYMELSSLRSEDTAVYYCAREYLGDDYSSGSYFDVWGQGTLVTVSS

SEQ ID NO: 520 - protein, 107 aa, Artificial Sequence
  Description of Artificial Sequence: Synthetic polypeptide
ETTLTQSPGTLSLSPGETAILSCRASQSVDSHLAWYQQKGGQAPRLLIYGASTRATGIPARFSGSGSGTDFTLTINGLEPEDFAIYFCQQRSMWPLTFGGGTKVEIK

SEQ ID NO: 521 - protein, 121 aa, Artificial Sequence
  Description of Artificial Sequence: Synthetic polypeptide
QVQLVQSGAEVKKPGSSVKVSCKASGGTFSSYAISWVRQAPGQGLEWMGGISPMFGTANYAQKFQGRVTITADKSTSTAYMELSSLRSEDTAVYYCARESGYSGTGQFDVWGQGTLVTVSS

SEQ ID NO: 522 - protein, 110 aa, Artificial Sequence
  Description of Artificial Sequence: Synthetic polypeptide
QSVLTQPPSASGTAGQRVTISCFGRTSNVGRNTVNWYQQLPGAAPKILIFNDNQRPSGVPDRFSGSKSGTAASLTISRLQSADEADYYCSSWDDDLNGPVFGGGTKLSVV

SEQ ID NO: 523 - protein, 122 aa, Artificial Sequence
  Description of Artificial Sequence: Synthetic polypeptide
QVQLVQSGAEVKKPGSSVKVSCKASGGIFSSYAISWVRQAPGQGLEWMGGISPIFGTANYAQKFQGRVTITADESTNTAYMELSSLRSEDTAVYYCARSGGYYDYGVGYDQWGQGTLVTVSS

SEQ ID NO: 524 - protein, 107 aa, Artificial Sequence
  Description of Artificial Sequence: Synthetic polypeptide
QPVLTQPPSASGTPGQRVTISCSGGRSNIGSNTVNWYQQLPGTAPKLLIYSNNHRPSGVPDRFSGSKSGNTASLTISGLQAEDEADYYCQSYDSSVVFGGGTKLTVL

SEQ ID NO: 525 - protein, 122 aa, Artificial Sequence
  Description of Artificial Sequence: Synthetic polypeptide
QVQLVQSGAEVKKPGSSVKVSCKASGGTFSSYAISWVRQAPGQGLEWMGGITPIFGTANYAQKFQGRVTITADESTSTAYMELSSLRSEDTAVYYCARSGGYSPSIGGFDVWGQGTLVTVSS

SEQ ID NO: 526 - protein, 110 aa, Artificial Sequence
  Description of Artificial Sequence: Synthetic polypeptide
QPGLTQPPSASGTPGQRVTISCSGSRSNIGRNTVNWYQQLPGTAPKLLIYSNNQRPSGVPDRVSGSKSGTSASLAISGLQSEDEADYYCAAWDVSLNGQVFGTGTKVTVL

SEQ ID NO: 527 - protein, 123 aa, Artificial Sequence
  Description of Artificial Sequence: Synthetic polypeptide
QVQLVQSGAEVKKPGSSVKVSCKASGGTFSSYAISWVRQAPGQGLEWMGGISPIFGTANYAQKFQGRVTITADRSTSTAYMELSSLRSEDTAVYYCARGPGYDPSSLRGFDVWGQGTLVTVSS

SEQ ID NO: 528 - protein, 110 aa, Artificial Sequence
  Description of Artificial Sequence: Synthetic polypeptide
SYELTQPPSVSKDLRQTATLTCTGNSNNVGNQGAAWLQQHQGHPPKLLFYKNNNRPSGISERLSASRSGNTASLTITGLQPEDEADYYCSAWDSSLSDWVFGGGTKLTVL

SEQ ID NO: 529 - protein, 117 aa, Artificial Sequence
  Description of Artificial Sequence: Synthetic polypeptide
QVQLVQSGAEVKKPGSSVKVSCKASGGTFSSYAISWVRQAPGQGLEWMGGIIPIFGTANYAQKFQGRVTITADESTNTAYMELSSLRSEDTAVYYCARGEEAYYDLWGQGTLVTVSS

SEQ ID NO: 530 - protein, 107 aa, Artificial Sequence
  Description of Artificial Sequence: Synthetic polypeptide
EIVLTQSPGTLSLSPGERATLSCWASQSVSSFLAWYQHKPGQVPRLLIYDASNRATGIPARFSGSGSGTHFTLTISSLEPEDFAVYYCQQRFNWPPTFGQGTKVESK

SEQ ID NO: 531 - protein, 122 aa, Artificial Sequence
  Description of Artificial Sequence: Synthetic polypeptide
QVQLVQSGAEVKKPGSSVKVSCKASGGTFSSYAISWVRQAPGQGLEWMGGITPMFGTANYAQKFQGRVTITADKSTSTAYMELSSLRSEDTAVYYCARGTSYLPGRSGFDVWGQGTLVTVSS

SEQ ID NO: 532 - protein, 107 aa, Artificial Sequence
  Description of Artificial Sequence: Synthetic polypeptide
QPGLTQPPSVSVSPGQTARITCSADALPKQYAYWYQQRPGQAPVLLIYKDTERPPGIPERFSGSSSGTTVTLTISGVQAEDEADYYCQSADASENSVFGGGTKVTVL

SEQ ID NO: 533 - protein, 122 aa, Artificial Sequence
  Description of Artificial Sequence: Synthetic polypeptide
QVQLVQSGAEVKKPGSSVKVSCKASGVTFRSYAISWVRQAPGQGLEWMGGISAMFGTANYAQKFQGRVTITADKSTNTAYMELSSLRSEDTAVYYCARGRGYDPSVGGFDVWGQGTLVTVSS

SEQ ID NO: 534 - protein, 110 aa, Artificial Sequence
  Description of Artificial Sequence: Synthetic polypeptide
NFMLTQPHSVSESPGKTVSISCTGSSGSIASNYVQWYQQRPGSAPATVIYEDNQRPSGVPDRFSGSIDSSSNSASLTISGLKTEDEADYYCQSYDTSNLVFGVGTKLTVL

SEQ ID NO: 535 - protein, 127 aa, Artificial Sequence
  Description of Artificial Sequence: Synthetic polypeptide
QVQLVQSGAEVKKPGSSVKVSCKASGGTFSSYAISWVRQAPGQGLEWMGGIIPIFGTANYAQKFQGRVTITADDSTSTAYMELSSLRSEDTAVYYCARDSTPSVTSSLYRIPAFDVWGQGTLVTVSS

SEQ ID NO: 536 - protein, 112 aa, Artificial Sequence
  Description of Artificial Sequence: Synthetic polypeptide
LPVLTQSSSASASLGSSVKLTCSLTNGPSNYIIAWHQQQPEKGPRYLMKLNSDGSHSKGDGIPDRFSGSSSGAERYLTISNLKSEDEADYYCETWDSNTHVVFGGGTKLTVL

SEQ ID NO: 537 - protein, 122 aa, Artificial Sequence
  Description of Artificial Sequence: Synthetic polypeptide
QVQLVQSGAEVKKPGSSVKVSCKASGGTFSSYAISWVRQAPGQGLEWMGGITPMFGTANYAQKFQGRVTITADKSTSTTYMELSSLRSEDTAVYYCARGPGYYPDSNNYDLWGQGTLVTVSS

SEQ ID NO: 538 - protein, 108 aa, Artificial Sequence
  Description of Artificial Sequence: Synthetic polypeptide
ETTLTQSPGTLSLSPGERATLSCRASQSVSSSYLAWYQQKPGQAPRLLIYGASSRATGIPDRFSGSGSGTDFTLTISRLEPEDFATYYCQQVNSFPRTFGQGTKLEMK

SEQ ID NO: 539 - protein, 122 aa, Artificial Sequence
  Description of Artificial Sequence: Synthetic polypeptide
QVQLVQSGAEVKKPGSSVKVSCKASGVTFSSYAISWVRQAPGQGLEWMGGISPMFGTANYAQKFQGRVTITADQSTNTAYMELSSLRSEDTAVYYCARGGTYSPGGTYFDVWGQGTLVTVSS

SEQ ID NO: 540 - protein, 110 aa, Artificial Sequence
  Description of Artificial Sequence: Synthetic polypeptide
QPVLTQPPSASATPGQTVTISCSGSSSNIGVSFVYWYQQFPGTAPKLLIYRDDMRQSGVPDRFSGFKSGSSASLTISGLQSEDEATYYCSAWDESLSSVLFGGGTKVTVL

SEQ ID NO: 541 - DNA, 351 bp, Artificial Sequence
  Description of Artificial Sequence: Synthetic polynucleotide
caggttcaattagtgcagtctggtgctgaagtgaaaaagcccggctcaagtgttaaagtaagctgtaaggcgagcggaggtacttttagctcatacgccattagctgggtgcgacaggctcctggtcagggcctcgaatggatgggcggcattatcacaatctttggtactgcaaattatgcccagaaatttcagggtagagtcacaattaccgcagacaaaagtacctcaaccgcatacatggaactgagtagcctgcgttccgaagatacagctgtgtattactgtgcgcgcggtgctacaggtttctacgacgtttggggccaggggaccttagtcactgtgtctagc

SEQ ID NO: 542 - DNA, 331 bp, Artificial Sequence
  Description of Artificial Sequence: Synthetic polynucleotide
ctgcctgtgctgactcagccaccctcagcgtctgggacccccgggcagagggtcaccatctcttgttctggaagcagctccaacatcggaagtaatactgtaaactggtaccagcagctcccaggaacggcccccaaactcctcatctatagtaataatcagcggccctcaggggtccctgaccgattctctggctccaagtctggcacctcagcctccctggccatcagtgggctccagtctgaggatgaggctgattattactgtgcagcatgggatgacagcctgaatggtccggtattcggcggagggaccaagctgaccgtcctag

SEQ ID NO: 543 - DNA, 369 bp, Artificial Sequence
  Description of Artificial Sequence: Synthetic polynucleotide
caggttcaattagtgcagtctggtgctgaagtgaaaaagcccggctcaagtgttaaagtaagctgtaaggcgagcggagttactttcagctcatacgccattagctgggtgcgacaggctcctggtcagggcctcgaatggatgggcggcattagccctatcttcggcactgcaaattatgcccagaaatttcagggtagagtcacaattaccgcagatgaaagcacgtcaactgcatacatggaactgagtagcctgcgttccgaagatacagctgtgtattactgtgcgcgcggtcgtgagtactacgctagtaatggtgacagtttcgatgtttggggccaggggaccttagtcactgtgtctagc

SEQ ID NO: 544 - DNA, 328 bp, Artificial Sequence
  Description of Artificial Sequence: Synthetic polynucleotide
cagcctgtgctgactcagccaccctcggtgtcagtggccccaggaaagacggccagcatttcctgtgagggaaacaacattgcgactaaaagtgtgcactggtaccagcagaagtcaggccacgcccctgtggtggtcgtctatcatgatagcgaccggccctcaggggtccctgaccgattctctggctccaagtctggcacctcagcctccctggccatcagtgggctccggtccgaggatgaggctgattattactgtgcagcatgggatgacagcctgagtggtccttgggtgttcggcggagggaccaagctgaccgtcctag

SEQ ID NO: 545 - DNA, 369 bp, Artificial Sequence
  Description of Artificial Sequence: Synthetic polynucleotide
caggttcaattagtgcagtctggtgctgaagtgaaaaagcccggctcaagtgttaaagtaagctgtaaggcgagcggaggtacctttagttcatacgccattagctgggtgcgacaggctcctggtcagggcctcgaatggatgggcggcattagcgcaatcttcggcactgcaaattatgcccagaaatttcagggtagagtcacaattaccgcagatgagagcacgcgcaccgcatacatggaactgagtagcctgcgttccgaagatacagctgtgtattactgtgcgcgcggtagtggttactacgttgctgctagtggtgctttcgacgtgtggggccaggggaccttagtcactgtgtctagc

SEQ ID NO: 546 - DNA, 331 bp, Artificial Sequence
  Description of Artificial Sequence: Synthetic polynucleotide
cagcctgggctgactcagccaccctcggtgtcaaagggcttgagacagaccgccacactcacctgcactgggaacatcaacaatgttggcgaccaaggagcaggttggctgcagcagcaccagggccgccctcccaaactcctgtcgtacaggaatagcaaccggccctcaggtgtctcagagagattctctgcatccaggtcaggaaatacagcctccctgaccattactggactccagcctgaggacgaggctgactattactgctcagcatgggacagcagcctcagtgattgggtgttcggcggagggaccaagctgaccgtcctag

SEQ ID NO: 547 - DNA, 381 bp, Artificial Sequence
  Description of Artificial Sequence: Synthetic polynucleotide
caggttcaattagtgcagtctggtgctgaagtgaaaaagcccggctcaagtgttaaagtaagctgtaaggcgagcggtggcatcttcagctcatacgccattagctgggtgcgacaggctcctggtcagggcctcgaatggatgggcggcatcaccccaatcttcggcactgcaaattatgcccagaaatttcagggtagagtcacaattaccgcagacgaaagcacgcgtaccgcatatatggaactgagtagcctgcgttccgaagatacagctgtgtattactgtgcgcgcgacctgagtcgtgacagtctgaatctgcctggtagtagtcctggttacgatctctggggccaggggaccttagtcactgtgtctagc

SEQ ID NO: 548 - DNA, 322 bp, Artificial Sequence
  Description of Artificial Sequence: Synthetic polynucleotide
gaaacgacactcacgcagtctccaggcaccctgtctttgtctccaggagaaagagccaccctctcctgcagggccagtcagagtgttagcagcaacttagcctggtaccagcagaaacctggccaggctcccaggctcctcatctatggtgcatccaccagggccactggtatcccagccaggttcagtggcagtgggtctgggacagagttcactctcaccatcagcagcctgcagtctgaagattttgcagtgtattactgtcagcagtatagtagttctccctacacttttggccaggggaccaaactggagatcaaac

SEQ ID NO: 549 - DNA, 369 bp, Artificial Sequence
  Description of Artificial Sequence: Synthetic polynucleotide
caggttcaattagtgcagtctggtgctgaagtgaaaaagcccggctcaagtgttaaagtaagctgtaaggcgagcggagtgattttcagctcatacgccattagctgggtgcgacaggctcctggtcagggcctcgaatggatgggcggcattagccctatcttcggcactgcaaattatgcccagaaatttcagggtagagtcacaattaccgcagatgagagcacgtcaaccgcatatatggaactgagtagcctgcgttccgaagatacagctgtgtattactgtgcgcgcagtcgtggttacgctcctggtacaagtttccactacgatgtgtggggccaggggaccttagtcactgtgtctagc

SEQ ID NO: 550 - DNA, 325 bp, Artificial Sequence
  Description of Artificial Sequence: Synthetic polynucleotide
ctgcctgtgctgactcaggcaccctcaatgtcagtggccccaggaaagacggccagtattacctgtgggggagacaacattggaagtaaaagtgtgcactggtaccagcagaagccaggccaggcccctgtgctggtcatgtattatgatagcgaccggccctcagggatccctgagcgattctctggctccaactctgggaacacggccaccctgaccatcagcagggtcgaggccggggatgaggccgactatttctgccagctgtgggatcatactaattctcatgtggtcttcggcggaaggaccaaactgaccgtcctag

SEQ ID NO: 551 - DNA, 363 bp, Artificial Sequence
  Description of Artificial Sequence: Synthetic polynucleotide
caggttcaattagtgcagtctggtgctgaagtgaaaaagcccggctcaagtgttaaagtaagctgtaaggcgagcggtggcacctttagttcttacgccattagctgggtgcgacaggctcctggtcagggcctcgaatggatgggcggcattagcccaatctttggcactgcaaattatgcccagaaatttcagggtagagtcacaattacctcagatgagagtaccagcactgcatacatggaactgagtagcctgcgttccgaagatacagctgtgtattactgtgcgcgcgaccaaggtggtacacgtggtaattacttcgacgtttggggccaggggaccttagtcactgtgtctagc

SEQ ID NO: 552 - DNA, 331 bp, Artificial Sequence
  Description of Artificial Sequence: Synthetic polynucleotide
cagcctgtgctgactcagccaccctcggtgtccaagggcttgagacagaccgccacagtcacctgcactgggaacagcaacaatgttggcaaccaaggagcagcttggctgcagcagcaccagggccaccctcccaaactcctatcctacaggaataacaaccggccctcagggatttcagagagattatctgcatccaggtcaggaaacacagcctccctgaccattgctggactccagcctgaggacgaggctgactattactgctcagcatgggacaacaccgtcagtggttgggtgttcggcggagggaccagggtgaccgtcctag

SEQ ID NO: 553 - DNA, 351 bp, Artificial Sequence
  Description of Artificial Sequence: Synthetic polynucleotide
caggttcaattagtgcagtctggtgctgaagtgaaaaagcccggctcaagtgttaaagtaagctgtaaggcgagcggtggtactttcagttcatacgccattagctgggtgcgacaggctcctggtcagggcctcgaatggatgggcggcattatcacaatcttcggtactgcaaattatgcccagaaatttcagggtagagtcacaattaccgcagatgagagcacgaacaccgcctacatggaactgagtagcctgcgttccgaagatacagctgtgtattactgtgcgcgcggtggtggtggtcgttttgacgtttggggccaggggaccttagtcactgtgtctagc

SEQ ID NO: 554 - DNA, 331 bp, Artificial Sequence
  Description of Artificial Sequence: Synthetic polynucleotide
tcctatgagctgactcagccaccctcagtgtctgggacccccgggcagagggtcaccatctcttgttctggaagcacctccaacatcggaaataatgctctaaactggtaccagaaactcccagggacggcccccaaactcctcatctatagtcttaatcagcgtccctcaggggtccctgaccgattctctggctccaagtctggcacctcagcctccctggccatcagtgggctccagtctgaggatgaggctgattattactgtgaagcatgggatgacagcctgagtggtccggtgttcggcggagggaccaaggtgaccgtcctag

SEQ ID NO: 555 - DNA, 351 bp, Artificial Sequence
  Description of Artificial Sequence: Synthetic polynucleotide
caggttcaattagtgcagtctggtgctgaagtgaaaaagcccggctcaagtgttaaagtaagctgtaaggcgagcggaggtccatttcgctcatacgccattagctgggtgcgacaggctcctggtcagggcctcgaatggatgggcggcattatcccaatcttcggcactgcaaattatgcccagaaatttcagggtagagtcacaattaccgcagatgaaagtacgtcaactgcatacatggaactgagtagcctgcgttccgaagatacagctgtgtattactgtgcgcgcggtggtgtttacagttttgatgtgtggggccaggggaccttagtcactgtgtctagc

SEQ ID NO: 556 - DNA, 331 bp, Artificial Sequence
  Description of Artificial Sequence: Synthetic polynucleotide
cagtctgggctgactcagccaccctcagcgtctgggacccccgggcagagggtcaccatttcttgttctggaagcggctccaacgtcggaagtaatgttgtaaattggtaccagcatctcccaggaacggcccccaaactcctcatctatcgtaataatcagcggccctcaggggtccctgaccgattctctggctccaagtctggcacctcagcctccctggccatcagtgggctccagtctgaggatgaggctgattattattgtgcagcatgggatgacagactgaatggctttgtctttggtactgggacgaaggtcaccgtcctga

SEQ ID NO: 557 - DNA, 375 bp, Artificial Sequence
  Description of Artificial Sequence: Synthetic polynucleotide
caggttcaattagtgcagtctggtgctgaagtgaaaaagcccggctcaagtgttaaagtaagctgtaaggcgagcggtgttcctttcagttcttacgccattagctgggtgcgacaggctcctggtcagggcctcgaatggatgggcggcatcagcccactgtttggtactgcaaattatgcccagaaatttcagggtagagtcacaattaccgcagaccagagcacgtcaaccgtctacatggaactgagtagcctgcgttccgaagatacagctgtgtattactgtgcgcgcggtctgggtacatacagtcctagtctgtaccctcgtggtatggacgtttggggccaggggaccttagtcactgtgtctagc

SEQ ID NO: 558 - DNA, 331 bp, Artificial Sequence
  Description of Artificial Sequence: Synthetic polynucleotide
ctgcctgtgctgactcagccaccctcagcgtctgggacccccggacagagtgtcaccatctcttgttctggaagcagctccaacatcggcagaaatgatgttaactggtaccagcaattcccgggaagggcccccaaactcctcatctatggtcgtgatgagcggcccttcggggtccctgcccgattctctggctccaagtctggcacctcagcctccctggccatcagtgggctccagtctgaggatgaggctgattattactgtgctgcatgggatgccagtctgatgatctatgtcttcggaactgggaccacggtcaccgtcctgg

SEQ ID NO: 559 - DNA, 366 bp, Artificial Sequence
  Description of Artificial Sequence: Synthetic polynucleotide
caggttcaattagtgcagtctggtgctgaagtgaaaaagcccggctcaagtgttaaagtaagctgtaaggcgagcggagtgacctttagttcatacgccattagctgggtgcgacaggctcctggtcagggcctcgaatggatgggcggcatcagccctatgttcggcactgcaaattatgcccagaaatttcagggtagagtcacaattaccgcagacgaaagtacgaatactgtctatatggaactgagtagcctgcgttccgaagatacagctgtgtattactgtgcgcgcggtcgtgcttacctgagtgttcgtggtagtttcgacgtgtggggccaggggaccttagtcactgtgtctagc

SEQ ID NO: 560 - DNA, 331 bp, Artificial Sequence
  Description of Artificial Sequence: Synthetic polynucleotide
tcctatgagctgactcagccaccctcagtgtctgggacccccgggcagagggtcaccatctcttgttctggaagcagctccaacatcggaagtaacactgtaaactggtaccagcagctcccaggaacggcccccaaactcctcatctatagtaataatcagcggccctcaggggtccctgaccgattctctggctccaagtctggcacctcagcctccctggccatcagtgggctccagtctgaggatgaggctgattattactgtgcagcatgggatgacagcctgaatggttatgtcttcggaactgggaccaaggtcaccgtcctag

SEQ ID NO: 561 - DNA, 351 bp, Artificial Sequence
  Description of Artificial Sequence: Synthetic polynucleotide
caggttcaattagtgcagtctggtgctgaagtgaaaaagcccggctcaagtgttaaagtaagctgtaaggcgagcggtgtgattttcagttcttacgccattagctgggtgcgacaggctcctggtcagggcctcgaatggatgggcggcatcatcccaatctttggcactgcaaattatgcccagaaatttcagggtagagtcacaattaccgcagataaaagtacgtcaactgcctatatggaactgagtagcctgcgttccgaagatacagctgtgtattactgtgcgcgcggtggtagtggtagtttcgacgtttggggccaggggaccttagtcactgtgtctagc

SEQ ID NO: 562 - DNA, 331 bp, Artificial Sequence
  Description of Artificial Sequence: Synthetic polynucleotide
cagcctgggctgactcagccaccctcagcgtctgggacccccgggcagagggtcaccatctcttgttctggaagcagttccaacctcggaagtaattatgtcttctggtaccagcacctcccaggagcggcccccaaactcctcatctatagaaatagtcagcggccctctggggtccctgaccgattctctggctccaagtctggcacctcagcctccctggccatcagtgggctccagtctgaggatgaggctgattattactgtgcagcatgggatgacagcctgaatggtgtggtattcggcggagggaccaagctgaccgtcctag

SEQ ID NO: 563 - DNA, 375 bp, Artificial Sequence
  Description of Artificial Sequence: Synthetic polynucleotide
caggttcaattagtgcagtctggtgctgaagtgaaaaagcccggctcaagtgttaaagtaagctgtaaggcgagcggagtgactttcagctcttacgccattagctgggtgcgacaggctcctggtcagggcctcgaatggatgggcggcatcagccctgtgtttggtactgcaaattatgcccagaaatttcagggtagagtcacaattaccgcagatgatagtacgaataccgcctacatggaactgagtagcctgcgttccgaagatacagctgtgtattactgtgcgcgcagtcgtggttacacagttagtagtctggctggtcgttacttcgaccagtggggccaggggaccttagtcactgtgtctagc

SEQ ID NO: 564 - DNA, 325 bp, Artificial Sequence
  Description of Artificial Sequence: Synthetic polynucleotide
gaaacgacactcacgcagtctccaggcaccctgtccttgtctccaggggaaagagcctccctctcctgcaaggccagtgagagtctttgcagcacttgcttggcctggtaccagcagaaacctggccaggctcccaggctcatcgtctatggtgcaaccagcagggccactggcatcccagacaggttcagtggcagtgggtctgggacagacttcactctcaccatcagcagactggagcctgaagattttgcagtgtattactgtcagcagtatggtagctcacctcagacgttcggccaagggaccaaggtggaaatcaaac

SEQ ID NO: 565 - DNA, 351 bp, Artificial Sequence
  Description of Artificial Sequence: Synthetic polynucleotide
caggttcaattagtgcagtctggtgctgaagtgaaaaagcccggctcaagtgttaaagtaagctgtaaggcgagcggaggcacttttagctcatacgccattagctgggtgcgacaggctcctggtcagggcctcgaatggatgggcggcatcgtgccactgtttggcactgcaaattatgcccagaaatttcagggtagagtcacaattaccgcagacgaaagtaccagcactgcatatatggaactgagtagcctgcgttccgaagatacagctgtgtattactgtgcgcgcggtctgggtctgtactttgacgtgtggggccaggggaccttagtcactgtgtctagc

SEQ ID NO: 566 - DNA, 328 bp, Artificial Sequence
  Description of Artificial Sequence: Synthetic polynucleotide
cagactgtggtgactcaggagccctcactgactgtgtccccaggagagacagtcactctcacctgtgcttccagcactggagcagtcaccagtggttactatccaaactggttccagcagaaacctggacaagcacccagggcactgatttatagtacaagcaacaaacactcctggacccctgcccggttctcaggctccctccttgggggcaaagctgccctgacactgtcaggtgtgcagcctgaggacgaggctgagtattattgtctgctctactatggtggtccttgggtgttcggcggagggaccaagttgaccgtcctgg

SEQ ID NO: 567 - DNA, 366 bp, Artificial Sequence
  Description of Artificial Sequence: Synthetic polynucleotide
caggttcaattagtgcagtctggtgctgaagtgaaaaagcccggctcaagtgttaaagtaagctgtaaggcgagcggtggtactttcagctcatacgccattagctgggtgcgacaggctcctggtcagggcctcgaatggatgggcggcattatcccaatcttcggtactgcaaattatgcccagaaatttcagggtagagtcacaattaccgcagacgaaagcacgaacaccgcctacatggaactgagtagcctgcgttccgaagatacagctgtgtattactgtgcgcgcgttcgtggtggttacggtccttacggtgactttgacgtttggggccaggggaccttagtcactgtgtctagc

SEQ ID NO: 568 - DNA, 331 bp, Artificial Sequence
  Description of Artificial Sequence: Synthetic polynucleotide
cagcctgggctgactcagccaccctcagcgtctgggacccccgggcagagggtcaccatctcttgttctggaagcagctccaacatcggaagtcattctgtgaactggtaccggcagctcccaggaacggccccccaactcctcatctatggtaacagcaatcggccctcaggggtccctgaccgattctctggctccaagtctggcacctcagcgtccctggccatcagtgggctccagtctgaggatgaggctgattatttctgtgcggcatgggatgacggcctgagtggttgggtgttcggcggagggaccaaattgaccgtcctag

SEQ ID NO: 569 - DNA, 369 bp, Artificial Sequence
  Description of Artificial Sequence: Synthetic polynucleotide
caggttcaattagtgcagtctggtgctgaagtgaaaaagcccggctcaagtgttaaagtaagctgtaaggcgagcggtggcccttttagctcatacgccattagctgggtgcgacaggctcctggtcagggcctcgaatggatgggcggcattagcccaatcttcggcactgcaaattatgcccagaaatttcagggtagagtcacaattaccgcagataagagtacgaacaccgcatacatggaactgagtagcctgcgttccgaagatacagctgtgtattactgtgcgcgcggtcgtagttacatcgttagtgttagtcctggttttgacgtgtggggccaggggaccttagtcactgtgtctagc

SEQ ID NO: 570 - DNA, 334 bp, Artificial Sequence
  Description of Artificial Sequence: Synthetic polynucleotide
cagtctgtgctgactcagccaccctccgcgtccgggtctcctggacagtcagtcaccatctcctgcactggaaccagcagtgacgttggtggttataactatgtctcctggtaccaacagtacccaggcaaagcccccaaactcatgatttatgaggtcagtaagcggccctcaggggtccctgatcgtttctctggctccaagtctggcacctcagcctccctggccatcagtgagctccaatctgaggatgaggctgattattactgtgcatcatgggatgacagcctgaatgcttatgtcttcggaagtgggaccaaggtcaccgtcctgg

SEQ ID NO: 571 - DNA, 369 bp, Artificial Sequence
  Description of Artificial Sequence: Synthetic polynucleotide
caggttcaattagtgcagtctggtgctgaagtgaaaaagcccggctcaagtgttaaagtaagctgtaaggcgagcggaggcattttcagttcatacgccattagctgggtgcgacaggctcctggtcagggcctcgaatggatgggcggcatcagcgcaatctttggtactgcaaattatgcccagaaatttcagggtagagtcacaattaccgcagatgagagtaccagcaccgcatatatggaactgagtagcctgcgttccgaagatacagctgtgtattactgtgcgcgcgacagtggtatcgctagtggttacacagcttacatggattattggggccaggggaccttagtcactgtgtctagc

SEQ ID NO: 572 - DNA, 325 bp, Artificial Sequence
  Description of Artificial Sequence: Synthetic polynucleotide
tcttctgagctgactcaggaccctgctgtgtctgtggccttgggacagacagtcaggatcacatgccaaggagacagcctcagaacctcttacgcaagctggtaccagcagaagccaggccagtcccctgtactggtcatctatcaaagtactaagcggccctcagggatccctgagcgattctctgcctccagctcaggaaacacagcttccctgaccatcactggggctcaggcggaagatgaggctgactattactgtaactcccggggcagcgggggtaacccctatgtcttcggaactgggaccaaggtcaccgtccttg

SEQ ID NO: 573 - DNA, 351 bp, Artificial Sequence
  Description of Artificial Sequence: Synthetic polynucleotide
caggttcaattagtgcagtctggtgctgaagtgaaaaagcccggctcaagtgttaaagtaagctgtaaggcgagcggtggcattttccgttcatacgccattagctgggtgcgacaggctcctggtcagggcctcgaatggatgggcggcattatcccaatgttcggtactgcaaattatgcccagaaatttcagggtagagtcacaattaccgcagatgagagtacgactactgtctatatggaactgagtagcctgcgttccgaagatacagctgtgtattactgtgcgcgcggtgctggtagtacatttgatgtgtggggccaggggaccttagtcactgtgtctagc

SEQ ID NO: 574 - DNA, 331 bp, Artificial Sequence
  Description of Artificial Sequence: Synthetic polynucleotide
cagtctgtgctgactcagccaccctcagcgtctgggacccccgggcagagggtcaccatctcttgttctggaagcagctccaacatcggaagtaatactgtaaactggtaccagcagctcccaggaacggcccccagactcctcatctatagtaataatcagcggccctcaggggtccctgaccgattctctggctccaagtctggcacctcagcctccctggccatcagtgggctccagtctgaggatgaggctgattattactgtgcagcatgggatgacagcctgaatggtcgggtgttcggcggagggaccaagctgaccgtcctag

SEQ ID NO: 575 - DNA, 363 bp, Artificial Sequence
  Description of Artificial Sequence: Synthetic polynucleotide
caggttcaattagtgcagtctggtgctgaagtgaaaaagcccggctcaagtgttaaagtaagctgtaaggcgagcggtggtaccttcagctcatacgccattagctgggtgcgacaggctcctggtcagggcctcgaatggatgggcggcattaaccctatctttggtactgcaaattatgcccagaaatttcagggtagagtcacaattaccgcagatgagagcacgaatactgcctacatggaactgagtagcctgcgttccgaagatacagctgtgtattactgtgcgcgcggtgagagtgcttactacagtcgtaattacgatgtgtggggccaggggaccttagtcactgtgtctagc

SEQ ID NO: 576 - DNA, 331 bp, Artificial Sequence
  Description of Artificial Sequence: Synthetic polynucleotide
tcctatgagctgactcagccaccctcggtgtccaagggcttgagacagaccgccacactcacctgcactgggaacagcagcaatgttggcaaccaaggagcatcttggctgcagcagcaccagggccaccctcccaaactcctatcctacaggaatgacaaccggccctcagggatctcagagagattctctgcatccaggtcaggaaatacagcctccctgaccattactggactccagcctgaggacgaggctgactattactgctcagcatgggacaacagcctcagtgcttgggtgttcggtggagggaccaagctgaccgtcctag

SEQ ID NO: 577 - DNA, 369 bp, Artificial Sequence
  Description of Artificial Sequence: Synthetic polynucleotide
caggttcaattagtgcagtctggtgctgaagtgaaaaagcccggctcaagtgttaaagtaagctgtaaggcgagcggtgtgacttttagctcatacgccattagctgggtgcgacaggctcctggtcagggcctcgaatggatgggcggcatcagcccaatgttcggcactgcaaattatgcccagaaatttcagggtagagtcacaattaccgcagatgagagcacgaataccgcatatatggaactgagtagcctgcgttccgaagatacagctgtgtattactgtgcgcgcggtggtggttactaccctgctggtgttggtcgttatgatgtttggggccaggggaccttagtcactgtgtctagc

SEQ ID NO: 578 - DNA, 340 bp, Artificial Sequence
  Description of Artificial Sequence: Synthetic polynucleotide
gacatcgtgatgacccagtctccagactccctggctgtgtctctgggcgagagggccaccatcaactgcaagtccagccagaatgttttatacagctccaacaataagaataacttagcttggtaccaacaaagaccaggacagcctcctaaagtgctcctttattgggcatctacccgggcatccggggtccctgaccgattcagtggcagcgggtctgggacagatttcactctcaccatcaacagccttcaggctgaagatgtggcactttattactgtcaacaatattatggtaaacccttcactttcggccctgggaccaaagtggagatcaaac

SEQ ID NO: 579 - DNA, 363 bp, Artificial Sequence
  Description of Artificial Sequence: Synthetic polynucleotide
caggttcaattagtgcagtctggtgctgaagtgaaaaagcccggctcaagtgttaaagtaagctgtaaggcgagcggaggtacctttagctcatacgccattagctgggtgcgacaggctcctggtcagggcctcgaatggatgggcggcattacccctctgttcggcactgcaaattatgcccagaaatttcagggtagagtcacaattaccgcagacgatagtacgtcaactgcatatatggaactgagtagcctgcgttccgaagatacagctgtgtattactgtgcgcgcggtcctacactgtacagtcctcctgtttttgatgtgtggggccaggggaccttagtcactgtgtctagc

SEQ ID NO: 580 - DNA, 331 bp, Artificial Sequence
  Description of Artificial Sequence: Synthetic polynucleotide
cagactgtggtgactcaggagccatcgttctcagtgtcccctggagggacaatcaccctcacttgtggcttgagttctggctcagtctctactactaattatcccagctggtaccagcagaccccaggccgaactccacgcacgctcatctacaacacaaacactcgctcttctggggtccctgatcgcttctctggctccatccttgggaacaaagctgccctcaccatcacgggggcccaggcaggtgatgaatctgattattactgtgttttatatatgggtcgtggcatttatgtcttcggaagtgggaccaaggtctccgtcctgg

SEQ ID NO: 581 - DNA, 369 bp, Artificial Sequence
  Description of Artificial Sequence: Synthetic polynucleotide
caggttcaattagtgcagtctggtgctgaagtgaaaaagcccggctcaagtgttaaagtaagctgtaaggcgagcggaggcacttttcgctcttacgccattagctgggtgcgacaggctcctggtcagggcctcgaatggatgggcggcatcatgccaatctttggtactgcaaattatgcccagaaatttcagggtagagtcacaattaccgcagacgagagtacgacaaccgtgtacatggaactgagtagcctgcgttccgaagatacagctgtgtattactgtgcgcgcggtgctggtgttagtgctggtcctagttggccttttgacgtttggggccaggggaccttagtcactgtgtctagc

SEQ ID NO: 582 - DNA, 331 bp, Artificial Sequence
  Description of Artificial Sequence: Synthetic polynucleotide
cagcctgggctgactcagccaccctcggtgtccaaggacttgaggcagaccgccacactcacctgcactgggaacagcaacaatgttggcaaacaaggagctacttggctgcagcagcaccagggccaccctcccaaactcctatcctacaggaataacaaccggccctcagggatctcagagagattctctgcatccaggtcaggagacacagcctccctgaccattactggcctccagcctgaggacgaggctgactattactgctcagcatgggacagcagcctcagtgtatgggtgttcggcggagggaccaagctgaccgtcctag

SEQ ID NO: 583 - DNA, 369 bp, Artificial Sequence
  Description of Artificial Sequence: Synthetic polynucleotide
caggttcaattagtgcagtctggtgctgaagtgaaaaagcccggctcaagtgttaaagtaagctgtaaggcgagcggtggtaccttcagctcatacgccattagctgggtgcgacaggctcctggtcagggcctcgaatggatgggcggcattagccctatgtttggtactgcaaattatgcccagaaatttcagggtagagtcacaattaccgcagatgagagcacgtcaaccgtgtacatggaactgagtagcctgcgttccgaagatacagctgtgtattactgtgcgcgcagtcgtggttacaatgttgctgctagtttcggtttcgatgtgtggggccaggggaccttagtcactgtgtctagc

SEQ ID NO: 584 - DNA, 322 bp, Artificial Sequence
  Description of Artificial Sequence: Synthetic polynucleotide
gaaattgtgttgacgcagtctccatccttcctgtctgcatctgtaggagacagagtcaccatcacttgccgggccagtcagtacattgatcgtagcttacactggtaccagcagaaaccagatcagtctccaaagctcctcatcaagtatgcttctcagtccatctcaggggtcccctcgaggttcagtggcagtggatctgggacagatttcagcctcaccatcaatagcctggaaactgaagatgctgcaacctattactgccatcagaccagtagtttgccgtggacattcggccaagggaccacggtggaaatcaaac

SEQ ID NO: 585 - DNA, 363 bp, Artificial Sequence
  Description of Artificial Sequence: Synthetic polynucleotide
caggttcaattagtgcagtctggtgctgaagtgaaaaagcccggctcaagtgttaaagtaagctgtaaggcgagcggtggcccatttagctcatacgccattagctgggtgcgacaggctcctggtcagggcctcgaatggatgggcggcatcatccctatcttcggcactgcaaattatgcccagaaatttcagggtagagtcacaattaccgcagatgaaagtacgtcaaccgcctatatggaactgagtagcctgcgttccgaagatacagctgtgtattactgtgcgcgcggtacagactacagtggttaccgtggttttgacgtttggggccaggggaccttagtcactgtgtctagc

SEQ ID NO: 586 - DNA, 331 bp, Artificial Sequence
  Description of Artificial Sequence: Synthetic polynucleotide
cagactgtggtgactcaggagccatcgttctcagtgtcccctggagggacagtcacactcacctgtgctttgagttctggctcagtctccagttttaactacgccagctggtaccagcagaccccaggccaggcgccacgcacactcatctccaacacaaacactcgctcttctggggtccctgatcgcttctctggctccatccttgggaacaaagctaccctcaccatcacgggggcccaggcagatgatgaatctcattattactgtgcactgtatgtgggtggtggcatttccgtgttcggcggagggaccaagttgaccgtcctag

SEQ ID NO: 587 - DNA, 348 bp, Artificial Sequence
  Description of Artificial Sequence: Synthetic polynucleotide
caggttcaattagtgcagtctggtgctgaagtgaaaaagcccggctcaagtgttaaagtaagctgtaaggcgagcggtgttacttttagctcatacgccattagctgggtgcgacaggctcctggtcagggcctcgaatggatgggcggcatcaccccaatctttggcactgcaaattatgcccagaaatttcagggtagagtcacaattaccgcagatcagagtacgagcactgcatacatggaactgagtagcctgcgttccgaagatacagctgtgtattactgtgcgcgcggtggtggtgttttcgacgtttggggccaggggaccttagtcactgtgtctagc

SEQ ID NO: 588 - DNA, 331 bp, Artificial Sequence
  Description of Artificial Sequence: Synthetic polynucleotide
tcctatgagctgactcagccaccctcggtgtctggagccccccgacagagggtcaccatctcctgttctggaagcagctccaacatcggaaataatgctgtaaactggtaccagcagctcccaggaaaggctcccaaactcctcatctattatgatgatatgctgccctcaggggtctctgaccgattctctggctccaagtctggctcctcagcctccctggccatcagtgggctccagtctgaggatgaggctgactattattgtgcagcatgggatgacagcctgagcggtccggttttcggcggagggaccaacctgaccgtcctag

SEQ ID NO: 589 - DNA, 366 bp, Artificial Sequence; identical to SEQ ID NO: 413
  Description of Artificial Sequence: Synthetic polynucleotide

SEQ ID NO: 590 - DNA, 331 bp, Artificial Sequence; identical to SEQ ID NO: 414
  Description of Artificial Sequence: Synthetic polynucleotide

SEQ ID NO: 591 - DNA, 363 bp, Artificial Sequence; identical to SEQ ID NO: 417
  Description of Artificial Sequence: Synthetic polynucleotide

SEQ ID NO: 592 - DNA, 334 bp, Artificial Sequence; identical to SEQ ID NO: 418
  Description of Artificial Sequence: Synthetic polynucleotide

SEQ ID NO: 593 - DNA, 375 bp, Artificial Sequence; identical to SEQ ID NO: 425
  Description of Artificial Sequence: Synthetic polynucleotide

SEQ ID NO: 594 - DNA, 331 bp, Artificial Sequence; identical to SEQ ID NO: 426
  Description of Artificial Sequence: Synthetic polynucleotide

SEQ ID NO: 595 - DNA, 369 bp, Artificial Sequence; identical to SEQ ID NO: 427
  Description of Artificial Sequence: Synthetic polynucleotide

SEQ ID NO: 596 - DNA, 346 bp, Artificial Sequence; identical to SEQ ID NO: 428
  Description of Artificial Sequence: Synthetic polynucleotide

SEQ ID NO: 597 - DNA, 375 bp, Artificial Sequence; identical to SEQ ID NO: 433
  Description of Artificial Sequence: Synthetic polynucleotide

SEQ ID NO: 598 - DNA, 331 bp, Artificial Sequence; identical to SEQ ID NO: 434
  Description of Artificial Sequence: Synthetic polynucleotide

SEQ ID NO: 599 - DNA, 366 bp, Artificial Sequence; identical to SEQ ID NO: 451
  Description of Artificial Sequence: Synthetic polynucleotide

SEQ ID NO: 600 - DNA, 322 bp, Artificial Sequence; identical to SEQ ID NO: 452
  Description of Artificial Sequence: Synthetic polynucleotide

SEQ ID NO: 601 - protein, 117 aa, Artificial Sequence
  Description of Artificial Sequence: Synthetic polypeptide
QVQLVQSGAEVKKPGSSVKVSCKASGGTFSSYAISWVRQAPGQGLEWMGGIITIFGTANYAQKFQGRVTITADKSTSTAYMELSSLRSEDTAVYYCARGATGFYDVWGQGTLVTVSS

SEQ ID NO: 602 - protein, 110 aa, Artificial Sequence
  Description of Artificial Sequence: Synthetic polypeptide
LPVLTQPPSASGTPGQRVTISCSGSSSNIGSNTVNWYQQLPGTAPKLLIYSNNQRPSGVPDRFSGSKSGTSASLAISGLQSEDEADYYCAAWDDSLNGPVFGGGTKLTVL

SEQ ID NO: 603 - protein, 123 aa, Artificial Sequence
  Description of Artificial Sequence: Synthetic polypeptide
QVQLVQSGAEVKKPGSSVKVSCKASGVTFSSYAISWVRQAPGQGLEWMGGISPIFGTANYAQKFQGRVTITADESTSTAYMELSSLRSEDTAVYYCARGREYYASNGDSFDVWGQGTLVTVSS

SEQ ID NO: 604 - protein, 109 aa, Artificial Sequence
  Description of Artificial Sequence: Synthetic polypeptide
QPVLTQPPSVSVAPGKTASISCEGNNIATKSVHWYQQKSGHAPVVVVYHDSDRPSGVPDRFSGSKSGTSASLAISGLRSEDEADYYCAAWDDSLSGPWVFGGGTKLTVL

SEQ ID NO: 605 - protein, 123 aa, Artificial Sequence
  Description of Artificial Sequence: Synthetic polypeptide
QVQLVQSGAEVKKPGSSVKVSCKASGGTFSSYAISWVRQAPGQGLEWMGGISAIFGTANYAQKFQGRVTITADESTRTAYMELSSLRSEDTAVYYCARGSGYYVAASGAFDVWGQGTLVTVSS

SEQ ID NO: 606 - protein, 110 aa, Artificial Sequence
  Description of Artificial Sequence: Synthetic polypeptide
QPGLTQPPSVSKGLRQTATLTCTGNINNVGDQGAGWLQQHQGRPPKLLSYRNSNRPSGVSERFSASRSGNTASLTITGLQPEDEADYYCSAWDSSLSDWVFGGGTKLTVL

SEQ ID NO: 607 - protein, 127 aa, Artificial Sequence
  Description of Artificial Sequence: Synthetic polypeptide
QVQLVQSGAEVKKPGSSVKVSCKASGGIFSSYAISWVRQAPGQGLEWMGGITPIFGTANYAQKFQGRVTITADESTRTAYMELSSLRSEDTAVYYCARDLSRDSLNLPGSSPGYDLWGQGTLVTVSS

SEQ ID NO: 608 - protein, 107 aa, Artificial Sequence
  Description of Artificial Sequence: Synthetic polypeptide
ETTLTQSPGTLSLSPGERATLSCRASQSVSSNLAWYQQKPGQAPRLLIYGASTRATGIPARFSGSGSGTEFTLTISSLQSEDFAVYYCQQYSSSPYTFGQGTKLEIK

SEQ ID NO: 609 - protein, 123 aa, Artificial Sequence
  Description of Artificial Sequence: Synthetic polypeptide
QVQLVQSGAEVKKPGSSVKVSCKASGVIFSSYAISWVRQAPGQGLEWMGGISPIFGTANYAQKFQGRVTITADESTSTAYMELSSLRSEDTAVYYCARSRGYAPGTSFHYDVWGQGTLVTVSS

SEQ ID NO: 610 - protein, 108 aa, Artificial Sequence
  Description of Artificial Sequence: Synthetic polypeptide
LPVLTQAPSMSVAPGKTASITCGGDNIGSKSVHWYQQKPGQAPVLVMYYDSDRPSGIPERFSGSNSGNTATLTISRVEAGDEADYFCQLWDHTNSHVVFGGRTKLTVL

SEQ ID NO: 611 - protein, 121 aa, Artificial Sequence
  Description of Artificial Sequence: Synthetic polypeptide
QVQLVQSGAEVKKPGSSVKVSCKASGGTFSSYAISWVRQAPGQGLEWMGGISPIFGTANYAQKFQGRVTITSDESTSTAYMELSSLRSEDTAVYYCARDQGGTRGNYFDVWGQGTLVTVSS

SEQ ID NO: 612 - protein, 110 aa, Artificial Sequence
  Description of Artificial Sequence: Synthetic polypeptide
QPVLTQPPSVSKGLRQTATVTCTGNSNNVGNQGAAWLQQHQGHPPKLLSYRNNNRPSGISERLSASRSGNTASLTIAGLQPEDEADYYCSAWDNTVSGWVFGGGTRVTVL

SEQ ID NO: 613 - protein, 117 aa, Artificial Sequence
  Description of Artificial Sequence: Synthetic polypeptide
QVQLVQSGAEVKKPGSSVKVSCKASGGTFSSYAISWVRQAPGQGLEWMGGIITIFGTANYAQKFQGRVTITADESTNTAYMELSSLRSEDTAVYYCARGGGGRFDVWGQGTLVTVSS

SEQ ID NO: 614 - protein, 110 aa, Artificial Sequence
  Description of Artificial Sequence: Synthetic polypeptide
SYELTQPPSVSGTPGQRVTISCSGSTSNIGNNALNWYQKLPGTAPKLLIYSLNQRPSGVPDRFSGSKSGTSASLAISGLQSEDEADYYCEAWDDSLSGPVFGGGTKVTVL

SEQ ID NO: 615 - protein, 117 aa, Artificial Sequence
  Description of Artificial Sequence: Synthetic polypeptide
QVQLVQSGAEVKKPGSSVKVSCKASGGPFRSYAISWVRQAPGQGLEWMGGIIPIFGTANYAQKFQGRVTITADESTSTAYMELSSLRSEDTAVYYCARGGVYSFDVWGQGTLVTVSS

SEQ ID NO: 616 - protein, 110 aa, Artificial Sequence
  Description of Artificial Sequence: Synthetic polypeptide
QSGLTQPPSASGTPGQRVTISCSGSGSNVGSNVVNWYQHLPGTAPKLLIYRNNQRPSGVPDRFSGSKSGTSASLAISGLQSEDEADYYCAAWDDRLNGFVFGTGTKVTVL

SEQ ID NO: 617 - protein, 125 aa, Artificial Sequence
  Description of Artificial Sequence: Synthetic polypeptide
QVQLVQSGAEVKKPGSSVKVSCKASGVPFSSYAISWVRQAPGQGLEWMGGISPLFGTANYAQKFQGRVTITADQSTSTVYMELSSLRSEDTAVYYCARGLGTYSPSLYPRGMDVWGQGTLVTVSS

SEQ ID NO: 618 - protein, 110 aa, Artificial Sequence
  Description of Artificial Sequence: Synthetic polypeptide
LPVLTQPPSASGTPGQSVTISCSGSSSNIGRNDVNWYQQFPGRAPKLLIYGRDERPFGVPARFSGSKSGTSASLAISGLQSEDEADYYCAAWDASLMIYVFGTGTTVTVL

SEQ ID NO: 619 - protein, 122 aa, Artificial Sequence
  Description of Artificial Sequence: Synthetic polypeptide
QVQLVQSGAEVKKPGSSVKVSCKASGVTFSSYAISWVRQAPGQGLEWMGGISPMFGTANYAQKFQGRVTITADESTNTVYMELSSLRSEDTAVYYCARGRAYLSVRGSFDVWGQGTLVTVSS

SEQ ID NO: 620 - protein, 110 aa, Artificial Sequence
  Description of Artificial Sequence: Synthetic polypeptide
SYELTQPPSVSGTPGQRVTISCSGSSSNIGSNTVNWYQQLPGTAPKLLIYSNNQRPSGVPDRFSGSKSGTSASLAISGLQSEDEADYYCAAWDDSLNGYVFGTGTKVTVL

SEQ ID NO: 621 - protein, 117 aa, Artificial Sequence
  Description of Artificial Sequence: Synthetic polypeptide
QVQLVQSGAEVKKPGSSVKVSCKASGVIFSSYAISWVRQAPGQGLEWMGGIIPIFGTANYAQKFQGRVTITADKSTSTAYMELSSLRSEDTAVYYCARGGSGSFDVWGQGTLVTVSS

SEQ ID NO: 622 - protein, 110 aa, Artificial Sequence
  Description of Artificial Sequence: Synthetic polypeptide
QPGLTQPPSASGTPGQRVTISCSGSSSNLGSNYVFWYQHLPGAAPKLLIYRNSQRPSGVPDRFSGSKSGTSASLAISGLQSEDEADYYCAAWDDSLNGVVFGGGTKLTVL

SEQ ID NO: 623 - protein, 125 aa, Artificial Sequence
  Description of Artificial Sequence: Synthetic polypeptide
QVQLVQSGAEVKKPGSSVKVSCKASGVTFSSYAISWVRQAPGQGLEWMGGISPVFGTANYAQKFQGRVTITADDSTNTAYMELSSLRSEDTAVYYCARSRGYTVSSLAGRYFDQWGQGTLVTVSS

SEQ ID NO: 624 - protein, 108 aa, Artificial Sequence
  Description of Artificial Sequence: Synthetic polypeptide
ETTLTQSPGTLSLSPGERASLSCKASESLCSTCLAWYQQKPGQAPRLIVYGATSRATGIPDRFSGSGSGTDFTLTISRLEPEDFAVYYCQQYGSSPQTFGQGTKVEIK

SEQ ID NO: 625 - protein, 117 aa, Artificial Sequence
  Description of Artificial Sequence: Synthetic polypeptide
QVQLVQSGAEVKKPGSSVKVSCKASGGTFSSYAISWVRQAPGQGLEWMGGIVPLFGTANYAQKFQGRVTITADESTSTAYMELSSLRSEDTAVYYCARGLGLYFDVWGQGTLVTVSS

SEQ ID NO: 626 - protein, 109 aa, Artificial Sequence
  Description of Artificial Sequence: Synthetic polypeptide
QTVVTQEPSLTVSPGETVTLTCASSTGAVTSGYYPNWFQQKPGQAPRALIYSTSNKHSWTPARFSGSLLGGKAALTLSGVQPEDEAEYYCLLYYGGPWVFGGGTKLTVL

SEQ ID NO: 627 - protein, 122 aa, Artificial Sequence
  Description of Artificial Sequence: Synthetic polypeptide
QVQLVQSGAEVKKPGSSVKVSCKASGGTFSSYAISWVRQAPGQGLEWMGGIIPIFGTANYAQKFQGRVTITADESTNTAYMELSSLRSEDTAVYYCARVRGGYGPYGDFDVWGQGTLVTVSS

SEQ ID NO: 628 - protein, 110 aa, Artificial Sequence
  Description of Artificial Sequence: Synthetic polypeptide
QPGLTQPPSASGTPGQRVTISCSGSSSNIGSHSVNWYRQLPGTAPQLLIYGNSNRPSGVPDRFSGSKSGTSASLAISGLQSEDEADYFCAAWDDGLSGWVFGGGTKLTVL

SEQ ID NO: 629 - protein, 123 aa, Artificial Sequence
  Description of Artificial Sequence: Synthetic polypeptide
QVQLVQSGAEVKKPGSSVKVSCKASGGPFSSYAISWVRQAPGQGLEWMGGISPIFGTANYAQKFQGRVTITADKSTNTAYMELSSLRSEDTAVYYCARGRSYIVSVSPGFDVWGQGTLVTVSS

SEQ ID NO: 630 - protein, 111 aa, Artificial Sequence
  Description of Artificial Sequence: Synthetic polypeptide
QSVLTQPPSASGSPGQSVTISCTGTSSDVGGYNYVSWYQQYPGKAPKLMIYEVSKRPSGVPDRFSGSKSGTSASLAISELQSEDEADYYCASWDDSLNAYVFGSGTKVTVL

SEQ ID NO: 631 - protein, 123 aa, Artificial Sequence
  Description of Artificial Sequence: Synthetic polypeptide
QVQLVQSGAEVKKPGSSVKVSCKASGGIFSSYAISWVRQAPGQGLEWMGGISAIFGTANYAQKFQGRVTITADESTSTAYMELSSLRSEDTAVYYCARDSGIASGYTAYMDYWGQGTLVTVSS

SEQ ID NO: 632 - protein, 108 aa, Artificial Sequence
  Description of Artificial Sequence: Synthetic polypeptide
SSELTQDPAVSVALGQTVRITCQGDSLRTSYASWYQQKPGQSPVLVIYQSTKRPSGIPERFSASSSGNTASLTITGAQAEDEADYYCNSRGSGGNPYVFGTGTKVTVL

SEQ ID NO: 633 - protein, 117 aa, Artificial Sequence
  Description of Artificial Sequence: Synthetic polypeptide
QVQLVQSGAEVKKPGSSVKVSCKASGGIFRSYAISWVRQAPGQGLEWMGGIIPMFGTANYAQKFQGRVTITADESTTTVYMELSSLRSEDTAVYYCARGAGSTFDVWGQGTLVTVSS

SEQ ID NO: 634 - protein, 110 aa, Artificial Sequence
  Description of Artificial Sequence: Synthetic polypeptide
QSVLTQPPSASGTPGQRVTISCSGSSSNIGSNTVNWYQQLPGTAPRLLIYSNNQRPSGVPDRFSGSKSGTSASLAISGLQSEDEADYYCAAWDDSLNGRVFGGGTKLTVL

SEQ ID NO: 635 - protein, 121 aa, Artificial Sequence
  Description of Artificial Sequence: Synthetic polypeptide
QVQLVQSGAEVKKPGSSVKVSCKASGGTFSSYAISWVRQAPGQGLEWMGGINPIFGTANYAQKFQGRVTITADESTNTAYMELSSLRSEDTAVYYCARGESAYYSRNYDVWGQGTLVTVSS

SEQ ID NO: 636 - protein, 110 aa, Artificial Sequence
  Description of Artificial Sequence: Synthetic polypeptide
SYELTQPPSVSKGLRQTATLTCTGNSSNVGNQGASWLQQHQGHPPKLLSYRNDNRPSGISERFSASRSGNTASLTITGLQPEDEADYYCSAWDNSLSAWVFGGGTKLTVL

SEQ ID NO: 637 - protein, 123 aa, Artificial Sequence
  Description of Artificial Sequence: Synthetic polypeptide
QVQLVQSGAEVKKPGSSVKVSCKASGVTFSSYAISWVRQAPGQGLEWMGGISPMFGTANYAQKFQGRVTITADESTNTAYMELSSLRSEDTAVYYCARGGGYYPAGVGRYDVWGQGTLVTVSS

SEQ ID NO: 638 - protein, 113 aa, Artificial Sequence
  Description of Artificial Sequence: Synthetic polypeptide
DIVMTQSPDSLAVSLGERATINCKSSQNVLYSSNNKNNLAWYQQRPGQPPKVLLYWASTRASGVPDRFSGSGSGTDFTLTINSLQAEDVALYYCQQYYGKPFTFGPGTKVEIK

SEQ ID NO: 639 - protein, 121 aa, Artificial Sequence
  Description of Artificial Sequence: Synthetic polypeptide
QVQLVQSGAEVKKPGSSVKVSCKASGGTFSSYAISWVRQAPGQGLEWMGGITPLFGTANYAQKFQGRVTITADDSTSTAYMELSSLRSEDTAVYYCARGPTLYSPPVFDVWGQGTLVTVSS

SEQ ID NO: 640 - protein, 110 aa, Artificial Sequence
  Description of Artificial Sequence: Synthetic polypeptide
QTVVTQEPSFSVSPGGTITLTCGLSSGSVSTTNYPSWYQQTPGRTPRTLIYNTNTRSSGVPDRFSGSILGNKAALTITGAQAGDESDYYCVLYMGRGIYVFGSGTKVSVL

SEQ ID NO: 641 - protein, 123 aa, Artificial Sequence
  Description of Artificial Sequence: Synthetic polypeptide
QVQLVQSGAEVKKPGSSVKVSCKASGGTFRSYAISWVRQAPGQGLEWMGGIMPIFGTANYAQKFQGRVTITADESTTTVYMELSSLRSEDTAVYYCARGAGVSAGPSWPFDVWGQGTLVTVSS

SEQ ID NO: 642 - protein, 110 aa, Artificial Sequence
  Description of Artificial Sequence: Synthetic polypeptide
QPGLTQPPSVSKDLRQTATLTCTGNSNNVGKQGATWLQQHQGHPPKLLSYRNNNRPSGISERFSASRSGDTASLTITGLQPEDEADYYCSAWDSSLSVWVFGGGTKLTVL

SEQ ID NO: 643 - protein, 123 aa, Artificial Sequence
  Description of Artificial Sequence: Synthetic polypeptide
QVQLVQSGAEVKKPGSSVKVSCKASGGTFSSYAISWVRQAPGQGLEWMGGISPMFGTANYAQKFQGRVTITADESTSTVYMELSSLRSEDTAVYYCARSRGYNVAASFGFDVWGQGTLVTVSS

SEQ ID NO: 644 - protein, 107 aa, Artificial Sequence
  Description of Artificial Sequence: Synthetic polypeptide
EIVLTQSPSFLSASVGDRVTITCRASQYIDRSLHWYQQKPDQSPKLLIKYASQSISGVPSRFSGSGSGTDFSLTINSLETEDAATYYCHQTSSLPWTFGQGTTVEIK

SEQ ID NO: 645 - protein, 121 aa, Artificial Sequence
  Description of Artificial Sequence: Synthetic polypeptide
QVQLVQSGAEVKKPGSSVKVSCKASGGPFSSYAISWVRQAPGQGLEWMGGIIPIFGTANYAQKFQGRVTITADESTSTAYMELSSLRSEDTAVYYCARGTDYSGYRGFDVWGQGTLVTVSS

SEQ ID NO: 646 - protein, 110 aa, Artificial Sequence
  Description of Artificial Sequence: Synthetic polypeptide
QTVVTQEPSFSVSPGGTVTLTCALSSGSVSSFNYASWYQQTPGQAPRTLISNTNTRSSGVPDRFSGSILGNKATLTITGAQADDESHYYCALYVGGGISVFGGGTKLTVL

SEQ ID NO: 647 - protein, 116 aa, Artificial Sequence
  Description of Artificial Sequence: Synthetic polypeptide
QVQLVQSGAEVKKPGSSVKVSCKASGVTFSSYAISWVRQAPGQGLEWMGGITPIFGTANYAQKFQGRVTITADQSTSTAYMELSSLRSEDTAVYYCARGGGVFDVWGQGTLVTVSS

SEQ ID NO: 648 - protein, 110 aa, Artificial Sequence
  Description of Artificial Sequence: Synthetic polypeptide
SYELTQPPSVSGAPRQRVTISCSGSSSNIGNNAVNWYQQLPGKAPKLLIYYDDMLPSGVSDRFSGSKSGSSASLAISGLQSEDEADYYCAAWDDSLSGPVFGGGTNLTVL

SEQ ID NO: 649 - protein, 122 aa, Artificial Sequence; identical to SEQ ID NO: 485
  Description of Artificial Sequence: Synthetic polypeptide

SEQ ID NO: 650 - protein, 110 aa, Artificial Sequence; identical to SEQ ID NO: 486
  Description of Artificial Sequence: Synthetic polypeptide

SEQ ID NO: 651 - protein, 121 aa, Artificial Sequence; identical to SEQ ID NO: 489
  Description of Artificial Sequence: Synthetic polypeptide

SEQ ID NO: 652 - protein, 111 aa, Artificial Sequence; identical to SEQ ID NO: 490
  Description of Artificial Sequence: Synthetic polypeptide

SEQ ID NO: 653 - protein, 125 aa, Artificial Sequence; identical to SEQ ID NO: 497
  Description of Artificial Sequence: Synthetic polypeptide

SEQ ID NO: 654 - protein, 110 aa, Artificial Sequence; identical to SEQ ID NO: 498
  Description of Artificial Sequence: Synthetic polypeptide

SEQ ID NO: 655 - protein, 123 aa, Artificial Sequence; identical to SEQ ID NO: 499
  Description of Artificial Sequence: Synthetic polypeptide

SEQ ID NO: 656 - protein, 115 aa, Artificial Sequence; identical to SEQ ID NO: 500
  Description of Artificial Sequence: Synthetic polypeptide

SEQ ID NO: 657 - protein, 125 aa, Artificial Sequence; identical to SEQ ID NO: 505
  Description of Artificial Sequence: Synthetic polypeptide

SEQ ID NO: 658 - protein, 110 aa, Artificial Sequence; identical to SEQ ID NO: 506
  Description of Artificial Sequence: Synthetic polypeptide

SEQ ID NO: 659 - protein, 122 aa, Artificial Sequence; identical to SEQ ID NO: 523
  Description of Artificial Sequence: Synthetic polypeptide

SEQ ID NO: 660 - protein, 107 aa, Artificial Sequence; identical to SEQ ID NO: 524
  Description of Artificial Sequence: Synthetic polypeptide

SEQ ID NO: 661 - protein, 9 aa, Artificial Sequence
  Description of Artificial Sequence: Synthetic peptide
  MOD_RES (4)..(5): Any naturally occurring amino acid
  MOD_RES (8)..(8): Any naturally occurring amino acid
CARXXGYXP

SEQ ID NO: 662 - protein, 8 aa, Artificial Sequence
  Description of Artificial Sequence: Synthetic peptide
  MOD_RES (4)..(6): Any naturally occurring amino acid
CARXXXYY

SEQ ID NO: 663 - DNA, 21 bp, Artificial Sequence
  Description of Artificial Sequence: Synthetic oligonucleotide
tggacaagggcttgagtggat

SEQ ID NO: 664 - DNA, 22 bp, Artificial Sequence
  Description of Artificial Sequence: Synthetic oligonucleotide
ccctggaacttctgtgcgtagt

SEQ ID NO: 665 - DNA, 18 bp, Artificial Sequence
  Description of Artificial Sequence: Synthetic oligonucleotide
cctatccttggtatagca

SEQ ID NO: 666 - DNA, 21 bp, Artificial Sequence
  Description of Artificial Sequence: Synthetic oligonucleotide
tggacaagggcttgagtggat

SEQ ID NO: 667 - DNA, 22 bp, Artificial Sequence
  Description of Artificial Sequence: Synthetic oligonucleotide
ccctggaacttctgtgcgtagt

SEQ ID NO: 668 - DNA, 18 bp, Artificial Sequence
  Description of Artificial Sequence: Synthetic oligonucleotide
ccctatctttggtacagc

SEQ ID NO: 669 - protein, 11 aa, Artificial Sequence
  Description of Artificial Sequence: Synthetic peptide
WGQGTLVTVSS

SEQ ID NO: 670 - protein, 20 aa, Artificial Sequence
  Description of Artificial Sequence: Synthetic peptide
YYYYYGMDVWGQGTTVTVSS

SEQ ID NO: 671 - protein, 14 aa, Artificial Sequence
  Description of Artificial Sequence: Synthetic peptide
FDVWGQGTLVTVSS

SEQ ID NO: 672 - protein, 16 aa, Artificial Sequence
  Description of Artificial Sequence: Synthetic peptide
GGGSGGGSGGGSGGGS

SEQ ID NO: 673 - protein, 8 aa, Artificial Sequence
  Description of Artificial Sequence: Synthetic peptide
IIPIFGTA

SEQ ID NO: 674 - protein, 8 aa, Artificial Sequence
  Description of Artificial Sequence: Synthetic peptide
ISPIFGTA

SEQ ID NO: 675 - protein, 8 aa, Artificial Sequence
  Description of Artificial Sequence: Synthetic peptide
IIPMFGTA

SEQ ID NO: 676 - protein, 8 aa, Artificial Sequence
  Description of Artificial Sequence: Synthetic peptide
IIPIFRTA

SEQ ID NO: 677 - DNA, 354 bp, Artificial Sequence
  Description of Artificial Sequence: Synthetic polynucleotide
caggtgcagctggtgcagtctgggggaggcgtggtccaacctgggaggtccctgagactctcctgtgtagcctctgagttcaccttcaatacttatggcatgcactgggtccgccaggctccaggcaagggactggagtgggtggcagctatttcatatgatggaactaagaaattttatgcagactccctgaagggccgattcaccatctccagagacaattccaagaacacgttgtatctccaaatgaacagcctgagatctgaggacacggccgtgtattactgtgcgagaagtggtgactccgatgcttttgatatctggggccaagggacaatggtcaccgtctcctca

SEQ ID NO: 678 - protein, 118 aa, Artificial Sequence
  Description of Artificial Sequence: Synthetic polypeptide
QVQLVQSGGGVVQPGRSLRLSCVASEFTFNTYGMHWVRQAPGKGLEWVAAISYDGTKKFYADSLKGRFTISRDNSKNTLYLQMNSLRSEDTAVYYCARSGDSDAFDIWGQGTMVTVSS

SEQ ID NO: 679 - DNA, 321 bp, Artificial Sequence
  Description of Artificial Sequence: Synthetic polynucleotide
tcctatgagctgactcagccaccctcagtgtccgtgtccccaggacagacagccaccatcacctgctctggagatgaattgggggataaatttgctttctggtatcaacaaaagccaggccagtcccctgtgctggtcatctatcaagatagtaagaggccctcagggatccctgagcgattctctggctccaactctgggaacacagccactctgaccatcagcgggacccaggctctggatgaggctgactattactgtcaggcgtgggacagcaacagttatgtcttcggaactgggaccaaggtcaccgtcctaggt

SEQ ID NO: 680 - protein, 106 aa, Artificial Sequence
  Description of Artificial Sequence: Synthetic polypeptide
SYELTQPPSVSVSPGQTATITCSGDELGDKFAFWYQQKPGQSPVLVIYQDSKRPSGIPERFSGSNSGNTATLTISGTQALDEADYYCQAWDSNSYVFGTGTKVTVL

SEQ ID NO: 681 - DNA, 360 bp, Artificial Sequence
  Description of Artificial Sequence: Synthetic polynucleotide
gaggtgcagctggtgcagtctggggctgaggtgaaggagcctgggtcctcggtgaaggtctcctgcaaggcttctgggggcaccttcggcagttatgctatcaactgggtgcgacaggcccctggacaaaggcttgagtggatgggatggatcgacgctgccaatggtaacacaaaatattcacagaagttccagggcagagtcaccattaccggagacacatccgcgagcacagcctacatggaactgagcagcctgagatctgaagacacggctgtgtattactgtgcgagagataggtggatgactacgcgggcttttgatatctggggccaagggacaatggtcaccgtctcttca

SEQ ID NO: 682 - protein, 120 aa, Artificial Sequence
  Description of Artificial Sequence: Synthetic polypeptide
EVQLVQSGAEVKEPGSSVKVSCKASGGTFGSYAINWVRQAPGQRLEWMGWIDAANGNTKYSQKFQGRVTITGDTSASTAYMELSSLRSEDTAVYYCARDRWMTTRAFDIWGQGTMVTVSS

SEQ ID NO: 683 - DNA, 333 bp, Artificial Sequence
  Description of Artificial Sequence: Synthetic polynucleotide
cagcctgtgctgactcagccaccctcagcgtctgggacccccgggcagagggtcaccatctcttgttctggaagcagctccaacatcggaagtaattatgttttctggtaccagcagctcccagggatggcccccaaactcctcatctctaggaataatcagcggccctcaggggtccctgaccgattctctggctccaagtctggcacctcagcctccctggccatcagtgggccccagtctgaggatgaggctgattattactgtgcagcatgggatgacagcctgcgtggtcccgtgttcggcggagggaccagggtgaccgtcctaggt

SEQ ID NO: 684 - protein, 110 aa, Artificial Sequence
  Description of Artificial Sequence: Synthetic polypeptide
QPVLTQPPSASGTPGQRVTISCSGSSSNIGSNYVFWYQQLPGMAPKLLISRNNQRPSGVPDRFSGSKSGTSASLAISGPQSEDEADYYCAAWDDSLRGPVFGGGTRVTVL

SEQ ID NO: 685 - DNA, 369 bp, Artificial Sequence
  Description of Artificial Sequence: Synthetic polynucleotide
caggtgcagctggtgcagtctggggctgaggtgaagaagcctgggtcctcggtgaaggtctcctgcaaggcgtctggaggcactttcagcagctatgcagtcagctgggtgcgacaggcccctggacaaggtcttgagtgggtgggaaggataatccctatttttggtaaggcaaactacgcacagaagttccagggcagagtcacgataaccgcggacaaatccacgagcacagcctatatggaactgagcagcctgagacctgaagacacggccgtatattactgtgcgagagatcaggggatttcggccaatttcaaagatgcttttgatatctggggccaagggaccacggtcaccgtctcctca

SEQ ID NO: 686 - protein, 123 aa, Artificial Sequence
  Description of Artificial Sequence: Synthetic polypeptide
QVQLVQSGAEVKKPGSSVKVSCKASGGTFSSYAVSWVRQAPGQGLEWVGRIIPIFGKANYAQKFQGRVTITADKSTSTAYMELSSLRPEDTAVYYCARDQGISANFKDAFDIWGQGTTVTVSS

SEQ ID NO: 687 - DNA, 321 bp, Artificial Sequence
  Description of Artificial Sequence: Synthetic polynucleotide
gaaacgacactcacgcagtctccagccaccctgtctgtgtctccaggggaaagagccaccctctcctgcagggccagtgagagtgttggcagcaacttagcctggtaccagcagaaacctggccaggctcccagcctcctcatctatggtgcatccaccagggccactggtatcccagacagattcagtggcagtgggtctgggacagacttcactctcaccatcagcagcctgcagtctgaagattttgcagcttattattgtcagcagtataataactggccactcaccttcggccctgggaccaaagtggaaatcaaa

SEQ ID NO: 688 - protein, 107 aa, Artificial Sequence
  Description of Artificial Sequence: Synthetic polypeptide
ETTLTQSPATLSVSPGERATLSCRASESVGSNLAWYQQKPGQAPSLLIYGASTRATGIPDRFSGSGSGTDFTLTISSLQSEDFAAYYCQQYNNWPLTFGPGTKVEIK

SEQ ID NO: 689 - DNA, 375 bp, Artificial Sequence
  Description of Artificial Sequence: Synthetic polynucleotide
caggtgcagctggtgcagtctggggctgaggtgaagaagcctgggtcctcggtgaaggtctcctgcaaggcttctggaggcaccttcagcagctatgctatcagctgggtgcgacaggcccctggacaagggcttgagtggatgggagggatcatccctatctttggtacagcaaactacgcacagaagttccagggcagagtcacgattaccgcggacaaatccacgagcacagcctacatggagctgagcagcctgagatctgaggacacggccgtgtattactgtgcgagggtaggatattgtagtagtaccagctgtcacatcggcgcttttgatatctggggccaagggaccacggtcaccgtctcctca

SEQ ID NO: 690 - protein, 125 aa, Artificial Sequence
  Description of Artificial Sequence: Synthetic polypeptide
QVQLVQSGAEVKKPGSSVKVSCKASGGTFSSYAISWVRQAPGQGLEWMGGIIPIFGTANYAQKFQGRVTITADKSTSTAYMELSSLRSEDTAVYYCARVGYCSSTSCHIGAFDIWGQGTTVTVSS

SEQ ID NO: 691 - DNA, 321 bp, Artificial Sequence
  Description of Artificial Sequence: Synthetic polynucleotide
gaaacgacactcacgcagtctccaggcaccctgtctttgtctccaggggaaagagccaccctctcctgcagggccagtcagagtgttagcagcagcatagcctggtatcagcagaaacctgggcaggctcccaggctcctcatgtttgattcatccaccagggccactggtatcccagacaggttcagtggcagtgggtctgggacagacttcactctcaacatcagcagcctagagcctgaagattttgcagtgtattactgtcagcagtatagtagctcaccttacacttttggccaggggaccaaactggagatcaaa

SEQ ID NO: 692 - protein, 107 aa, Artificial Sequence
  Description of Artificial Sequence: Synthetic polypeptide
ETTLTQSPGTLSLSPGERATLSCRASQSVSSSIAWYQQKPGQAPRLLMFDSSTRATGIPDRFSGSGSGTDFTLNISSLEPEDFAVYYCQQYSSSPYTFGQGTKLEIK

SEQ ID NO: 693 - DNA, 375 bp, Artificial Sequence
  Description of Artificial Sequence: Synthetic polynucleotide
caggtgcagctggtgcagtctggggctgaggtgaagaagcctgggtcctcggtgaaggtctcctgcaaggcttctggaggcaccttcagcagctatgctatcagctgggtgcgacaggcccctggacaagggcttgagtggatgggagggatcatccctatctttggtacagcaaactacgcacagaagttccagggcagagtcacgattaccgcggacaaatccacgagcacagcctacatggagctgagcagcctgagatctgaggacacggccgtgtattactgtgcgagagcctcatattgtagtactaccagctgcgctagtggtgcttttgatatctggggccaaggcaccctggtcaccgtctcctca

SEQ ID NO: 694 - protein, 125 aa, Artificial Sequence
  Description of Artificial Sequence: Synthetic polypeptide
QVQLVQSGAEVKKPGSSVKVSCKASGGTFSSYAISWVRQAPGQGLEWMGGIIPIFGTANYAQKFQGRVTITADKSTSTAYMELSSLRSEDTAVYYCARASYCSTTSCASGAFDIWGQGTLVTVSS

SEQ ID NO: 695 - DNA, 339 bp, Artificial Sequence
  Description of Artificial Sequence: Synthetic polynucleotide
gacatccagatgacccagtctccagactccctggctgtgtctctgggcgagagggccaccatcaactgcaagtccagccagagtgttttatacagctccaacaataagaactacttagcttggtaccagcagaaaccaggacagcctcctaagctgctcatttactgggcatctgcccgggaatccggggtccctgaccgattcagtggcagcgggtctgggacagatttcactctcaccatcagcagcctgcagcctgaagatgtggcaatttattactgtcagcaatattatagtgttccattcactttcggccctgggaccaaagtggagatcaaa

SEQ ID NO: 696 - protein, 113 aa, Artificial Sequence
  Description of Artificial Sequence: Synthetic polypeptide
DIQMTQSPDSLAVSLGERATINCKSSQSVLYSSNNKNYLAWYQQKPGQPPKLLIYWASARESGVPDRFSGSGSGTDFTLTISSLQPEDVAIYYCQQYYSVPFTFGPGTKVEIK

SEQ ID NO: 697 - DNA, 363 bp, Artificial Sequence
  Description of Artificial Sequence: Synthetic polynucleotide
gaggtgcagctggtgcagtctggagctgaggtgaagaagcctggggcctcagtgaaggtttcctgcaaggcttctggatacaccttcaatgtatatgctatcaactgggtgcgacaggcccctggacaagggcttgagtggatgggaaggatcatccctatccttggtatagcaaactacgcacagaagttccagggcagagtcacgattaccgcggacaaatccacgagcacagcctacatggagctgagcagcctgagatctgaggacacggccgtgtattactgtgcgagagattactatggttcgggagctaggggctttgactactggggccagggcaccctggtcaccgtctcctca

SEQ ID NO: 698 - protein, 121 aa, Artificial Sequence
  Description of Artificial Sequence: Synthetic polypeptide
EVQLVQSGAEVKKPGASVKVSCKASGYTFNVYAINWVRQAPGQGLEWMGRIIPILGIANYAQKFQGRVTITADKSTSTAYMELSSLRSEDTAVYYCARDYYGSGARGFDYWGQGTLVTVSS

SEQ ID NO: 699 - DNA, 333 bp, Artificial Sequence
  Description of Artificial Sequence: Synthetic polynucleotide
cagcctgggctgactcagccaccctcggtgtccaagggcttgagacagaccgccacactcacctgcactgggaacagcaacaatgttggcaaccaaggagcagcttggctgcagcagcaccagggccaccctcccaaactcctatcctacacgaataacaaccggccctcagggatctcagagagattatctgcatccaggtcaggaaacacagcctccctggccattactggactccagcctgaggacgaggcagactattactgtgcatcatgggacagcagcctcagtgtttgggtgatcggcggagggaccaagttgaccgtcctaggt

SEQ ID NO: 700 - protein, 110 aa, Artificial Sequence
  Description of Artificial Sequence: Synthetic polypeptide
QPGLTQPPSVSKGLRQTATLTCTGNSNNVGNQGAAWLQQHQGHPPKLLSYTNNNRPSGISERLSASRSGNTASLAITGLQPEDEADYYCASWDSSLSVWVIGGGTKLTVL

SEQ ID NO: 701 - DNA, 378 bp, Artificial Sequence
  Description of Artificial Sequence: Synthetic polynucleotide
gaggtgcagctggtgcagtctggggctgaggtgaagaagcctgggtcctcggtgaaggtctcctgcaaggcttctggaggcaccttcagcagctatgctatcagctgggtgcgacaggcccctggacaagggcttgagtggatgggagggatcatccctatctttggtatagcaaactacgcacagaagttccagggcagagtcacgattaccgcggacaaatccacgagcacagcctacatggagctgagcagcctgagatctgaggacacggccgtgtattactgtgcgagctctaattactatggttcagggagttattatccgcgaagtgcttttgatatctggggccaagggaccacggtcaccgtctcctca

SEQ ID NO: 702 - protein, 126 aa, Artificial Sequence
  Description of Artificial Sequence: Synthetic polypeptide
EVQLVQSGAEVKKPGSSVKVSCKASGGTFSSYAISWVRQAPGQGLEWMGGIIPIFGIANYAQKFQGRVTITADKSTSTAYMELSSLRSEDTAVYYCASSNYYGSGSYYPRSAFDIWGQGTTVTVSS

SEQ ID NO: 703 - DNA, 321 bp, Artificial Sequence
  Description of Artificial Sequence: Synthetic polynucleotide
gaaacgacactcacgcagtctccagccaccctgtctgtgtctccaggggaaagggccatcctctcctgcagggccagtcagagtataagcaatgacttagcctggtaccagcagaaacctggccaggctcccaggctcctcatctatggtgcatccagcagggccactggcatcccagacaggttcagtggcagtgggtctgggacggacttcaccttcaccatcagcagactggagtctgaagattttgcagtgtattactgtcagcagtatggtgtttcacctctcactttcggcggggggaccaaggtggagatcaaa

SEQ ID NO: 704 - protein, 107 aa, Artificial Sequence
  Description of Artificial Sequence: Synthetic polypeptide
ETTLTQSPATLSVSPGERAILSCRASQSISNDLAWYQQKPGQAPRLLIYGASSRATGIPDRFSGSGSGTDFTFTISRLESEDFAVYYCQQYGVSPLTFGGGTKVEIK

SEQ ID NO: 705 - protein, 8 aa, Artificial Sequence
  Description of Artificial Sequence: Synthetic peptide
EFTFNTYG

SEQ ID NO: 706 - protein, 8 aa, Artificial Sequence
  Description of Artificial Sequence: Synthetic peptide
ISYDGTKK

SEQ ID NO: 707 - protein, 11 aa, Artificial Sequence
  Description of Artificial Sequence: Synthetic peptide
ARSGDSDAFDI

SEQ ID NO: 708 - protein, 8 aa, Artificial Sequence
  Description of Artificial Sequence: Synthetic peptide
GGTFGSYA

SEQ ID NO: 709 - protein, 8 aa, Artificial Sequence
  Description of Artificial Sequence: Synthetic peptide
IDAANGNT

SEQ ID NO: 710 - protein, 13 aa, Artificial Sequence
  Description of Artificial Sequence: Synthetic peptide
ARDRWMTTRAFDI

SEQ ID NO: 711 - protein, 8 aa, Artificial Sequence
  Description of Artificial Sequence: Synthetic peptide
GGTFSSYA

SEQ ID NO: 712 - protein, 8 aa, Artificial Sequence
  Description of Artificial Sequence: Synthetic peptide
IIPIFGKA

SEQ ID NO: 713 - protein, 16 aa, Artificial Sequence
  Description of Artificial Sequence: Synthetic peptide
ARDQGISANFKDAFDI

SEQ ID NO: 714 - protein, 8 aa, Artificial Sequence
  Description of Artificial Sequence: Synthetic peptide
GGTFSSYA

SEQ ID NO: 715 - protein, 18 aa, Artificial Sequence
  Description of Artificial Sequence: Synthetic peptide
ARVGYCSSTSCHIGAFDI

SEQ ID NO: 716 - protein, 18 aa, Artificial Sequence
  Description of Artificial Sequence: Synthetic peptide
ARASYCSTTSCASGAFDI

SEQ ID NO: 717 - protein, 8 aa, Artificial Sequence
  Description of Artificial Sequence: Synthetic peptide
GYTFNVYA

SEQ ID NO: 718 - protein, 8 aa, Artificial Sequence
  Description of Artificial Sequence: Synthetic peptide
IIPILGIA

SEQ ID NO: 719 - protein, 14 aa, Artificial Sequence
  Description of Artificial Sequence: Synthetic peptide
ARDYYGSGARGFDY

SEQ ID NO: 720 - protein, 8 aa, Artificial Sequence
  Description of Artificial Sequence: Synthetic peptide
IIPIFGIA

SEQ ID NO: 721 - protein, 19 aa, Artificial Sequence
  Description of Artificial Sequence: Synthetic peptide
ASSNYYGSGSYYPRSAFDI

SEQ ID NO: 722 - protein, 6 aa, Artificial Sequence
  Description of Artificial Sequence: Synthetic peptide
ELGDKF

SEQ ID NO: 723 - protein, 3 aa, Artificial Sequence
  Description of Artificial Sequence: Synthetic peptide
QDS

SEQ ID NO: 724 - protein, 9 aa, Artificial Sequence
  Description of Artificial Sequence: Synthetic peptide
QAWDSNSYV

SEQ ID NO: 725 - protein, 8 aa, Artificial Sequence
  Description of Artificial Sequence: Synthetic peptide
SSNIGSNY

SEQ ID NO: 726 - protein, 3 aa, Artificial Sequence
  Description of Artificial Sequence: Synthetic peptide
RNN

SEQ ID NO: 727 - protein, 11 aa, Artificial Sequence
  Description of Artificial Sequence: Synthetic peptide
AAWDDSLRGPV

SEQ ID NO: 728 - protein, 6 aa, Artificial Sequence
  Description of Artificial Sequence: Synthetic peptide
ESVGSN

SEQ ID NO: 729 - protein, 3 aa, Artificial Sequence
  Description of Artificial Sequence: Synthetic peptide
GAS

SEQ ID NO: 730 - protein, 9 aa, Artificial Sequence
  Description of Artificial Sequence: Synthetic peptide
QQYNNWPLT

SEQ ID NO: 731 - protein, 6 aa, Artificial Sequence
  Description of Artificial Sequence: Synthetic peptide
QSVSSS

SEQ ID NO: 732 - protein, 3 aa, Artificial Sequence
  Description of Artificial Sequence: Synthetic peptide
DSS

SEQ ID NO: 733 - protein, 9 aa, Artificial Sequence
  Description of Artificial Sequence: Synthetic peptide
QQYSSSPYT

SEQ ID NO: 734 - protein, 1255 aa, Middle East Respiratory Syndrome coronavirus
MFIFLLFLTLTSGSDLDRCTTFDDVQAPNYTQHTSSMRGVYYPDEIFRSDTLYLTQDLFLPFYSNVTGFHTINHTFGNPVIPFKDGIYFAATEKSNVVRGWVFGSTMNNKSQSVIIINNSTNVVIRACNFELCDNPFFAVSKPMGTQTHTMIFDNAFNCTFEYISDAFSLDVSEKSGNFKHLREFVFKNKDGFLYVYKGYQPIDVVRDLPSGFNTLKPIFKLPLGINITNFRAILTAFSPAQDIWGTSAAAYFVGYLKPTTFMLKYDENGTITDAVDCSQNPLAELKCSVKSFEIDKGIYQTSNFRVVPSGDVVRFPNITNLCPFGEVFNATKFPSVYAWERKKISNCVADYSVLYNSTFFSTFKCYGVSATKLNDLCFSNVYADSFVVKGDDVRQIAPGQTGVIADYNYKLPDDFMGCVLAWNTRNIDATSTGNYNYKYRYLRHGKLRPFERDISNVPFSPDGKPCTPPALNCYWPLNDYGFYTTTGIGYQPYRVVVLSFELLNAPATVCGPKLSTDLIKNQCVNFNFNGLTGTGVLTPSSKRFQPFQQFGRDVSDFTDSVRDPKTSEILDISPCSFGGVSVITPGTNASSEVAVLYQDVNCTDVSTAIHADQLTPAWRIYSTGNNVFQTQAGCLIGAEHVDTSYECDIPIGAGICASYHTVSLLRSTSQKSIVAYTMSLGADSSIAYSNNTIAIPTNFSISITTEVMPVSMAKTSVDCNMYICGDSTECANLLLQYGSFCTQLNRALSGIAAEQDRNTREVFAQVKQMYKTPTLKYFGGFNFSQILPDPLKPTKRSFIEDLLFNKVTLADAGFMKQYGECLGDINARDLICAQKFNGLTVLPPLLTDDMIAAYTAALVSGTATAGWTFGAGAALQIPFAMQMAYRFNGIGVTQNVLYENQKQIANQFNKAISQIQESLTTTSTALGKLQDVVNQNAQALNTLVKQLSSNFGAISSVLNDILSRLDKVEAEVQIDRLITGRLQSLQTYVTQQLIRAAEIRASANLAATKMSECVLGQSKRVDFCGKGYHLMSFPQAAPHGVVFLHVTYVPSQERNFTTAPAICHEGKAYFPREGVFVFNGTSWFITQRNFFSPQIITTDNTFVSGNCDVVIGIINNTVYDPLQPELDSFKEELDKYFKNHTSPDVDLGDISGINASVVNIQKEIDRLNEVAKNLNESLIDLQELGKYEQYIKWPWYVWLGFIAGLIAIVMVTILLCCMTSCCSCLKGACSCGSCCKFDEDDSEPVLKGVKLHYT

SEQ ID NO: 735 - protein, 8 aa, Artificial Sequence
  Description of Artificial Sequence: Synthetic peptide
IIPIFGTA

SEQ ID NO: 736 - protein, 8 aa, Artificial Sequence
  Description of Artificial Sequence: Synthetic peptide
SNNVGNQG

SEQ ID NO: 737 - protein, 12 aa, Artificial Sequence
  Description of Artificial Sequence: Synthetic peptide
QSVLYSSNNKNY

SEQ ID NO: 738 - protein, 3 aa, Artificial Sequence
  Description of Artificial Sequence: Synthetic peptide
WAS

SEQ ID NO: 739 - protein, 9 aa, Artificial Sequence
  Description of Artificial Sequence: Synthetic peptide
QQYYSVPFT

SEQ ID NO: 740 - protein, 6 aa, Artificial Sequence
  Description of Artificial Sequence: Synthetic peptide
QSISND

SEQ ID NO: 741 - protein, 9 aa, Artificial Sequence
  Description of Artificial Sequence: Synthetic peptide
QQYGVSPLT

SEQ ID NO: 742 - protein, 3 aa, Artificial Sequence
  Description of Artificial Sequence: Synthetic peptide
TNN

SEQ ID NO: 743 - protein, 11 aa, Artificial Sequence
  Description of Artificial Sequence: Synthetic peptide
ASWDSSLSVWV

SEQ ID NO: 744 - protein, 96 aa, Homo sapiens
QVQLVQSGAEVKKPGSSVKVSCKASGGTFSSYAISWVRQAPGQGLEWMGGIIPIFGTANYAQKFQGRVTITADKSTSTAYMELSSLRSEDTAVYYC

SEQ ID NO: 745 - protein, 96 aa, Homo sapiens
QVQLVQSGAEVKKPGSSVKVSCKASGGTFSSYAISWVRQAPGQGLEWMGRIIPILGIANYAQKFQGRVTITADKSTSTAYMELSSLRSEDTAVYYC

SEQ ID NO: 746 - protein, 96 aa, Homo sapiens
QVQLVESGGGVVQPGRSLRLSCAASGFTFSSYGMHWVRQAPGKGLEWVAVISYDGSNKYYADSVKGRFTISRDNSKNTLYLQMNSLRAEDTAVYYC

SEQ ID NO: 747 - protein, 96 aa, Homo sapiens
QVQLVQSGAEVKKPGASVKVSCKASGYTFTSYAMHWVRQAPGQRLEWMGWINAGNGNTKYSQKFQGRVTITRDTSASTAYMELSSLRSEDTAVYYC

SEQ ID NO: 748 - protein, 87 aa, Homo sapiens
SYELTQPPSVSVSPGQTASITCSGDKLGDKYACWYQQKPGQSPVLVIYQDSKRPSGIPERFSGSNSGNTATLTISGTQAMDEADYYC

SEQ ID NO: 749 - protein, 89 aa, Homo sapiens
QSVLTQPPSASGTPGQRVTISCSGSSSNIGSNYVYWYQQLPGTAPKLLIYRNNQRPSGVPDRFSGSKSGTSASLAISGLRSEDEADYYC

SEQ ID NO: 750 - protein, 88 aa, Homo sapiens
EIVMTQSPATLSVSPGERATLSCRASQSVSSNLAWYQQKPGQAPRLLIYGASTRATGIPARFSGSGSGTEFTLTISSLQSEDFAVYYC

SEQ ID NO: 751 - protein, 94 aa, Homo sapiens
DIVMTQSPDSLAVSLGERATINCKSSQSVLYSSNNKNYLAWYQQKPGQPPKLLIYWASTRESGVPDRFSGSGSGTDFTLTISSLQAEDVAVYYC

SEQ ID NO: 752 - protein, 89 aa, Homo sapiens
EIVLTQSPGTLSLSPGERATLSCRASQSVSSSYLAWYQQKPGQAPRLLIYGASSRATGIPDRFSGSGSGTDFTLTISRLEPEDFAVYYC

SEQ ID NO: 753 - protein, 89 aa, Homo sapiens
QAGLTQPPSVSKGLRQTATLTCTGNSNNVGNQGAAWLQQHQGHPPKLLSYRNNNRPSGISERLSASRSGNTASLTITGLQPEDEADYYC

SEQ ID NO: 754 - protein, 12 aa, Middle East Respiratory Syndrome coronavirus
AAALDTVYRPNI

SEQ ID NO: 755 - protein, 12 aa, Middle East Respiratory Syndrome coronavirus
PAVLDTVYRPNI

SEQ ID NO: 756 - protein, 12 aa, Middle East Respiratory Syndrome coronavirus
ASALDTVYRPNI

SEQ ID NO: 757 - protein, 12 aa, Middle East Respiratory Syndrome coronavirus
AVALDTVYRPNI

SEQ ID NO: 758 - protein, 12 aa, Middle East Respiratory Syndrome coronavirus
AAAFDTVYRPNI

SEQ ID NO: 759 - protein, 12 aa, Middle East Respiratory Syndrome coronavirus
AAALGTVYRPNI

SEQ ID NO: 760 - protein, 12 aa, Middle East Respiratory Syndrome coronavirus
AAALDTAYRPNI

SEQ ID NO: 761 - protein, 12 aa, Middle East Respiratory Syndrome coronavirus
AAALDTVYRPII

SEQ ID NO: 762 - protein, 12 aa, Middle East Respiratory Syndrome coronavirus
AAALDTVYRSNI

SEQ ID NO: 763 - protein, 12 aa, Middle East Respiratory Syndrome coronavirus
AAALDTVYGPNI

SEQ ID NO: 764 - protein, 12 aa, Artificial Sequence
  Description of Artificial Sequence: Synthetic peptide
AAALDTVYSPNT

SEQ ID NO: 765 - protein, 12 aa, Middle East Respiratory Syndrome coronavirus
AAALDTVYTPNI

SEQ ID NO: 766 - protein, 12 aa, Middle East Respiratory Syndrome coronavirus
AAALDTVYKPNI

SEQ ID NO: 767 - protein, 12 aa, Middle East Respiratory Syndrome coronavirus
AAAFDAVYRPNI

SEQ ID NO: 768 - protein, 12 aa, Middle East Respiratory Syndrome coronavirus
AAALDTVYKPNI

SEQ ID NO: 769 - protein, 12 aa, Middle East Respiratory Syndrome coronavirus
AAAFDTVCRPNI

SEQ ID NO: 770 - protein, 12 aa, Middle East Respiratory Syndrome coronavirus
AAALDTVHRPNI

SEQ ID NO: 771 - protein, 112 aa, Homo sapiens
QVQLVQSGGGVVQPGRSLRLSCAASGFTFSSYGMHWVRQAPGKGLEWVAVISYDGSKYYADSVKGRFTISRDNSKNTLYLQMNSLRAEDTAVYYCARDGDVWGQGTTVTVSS

SEQ ID NO: 772 - protein, 121 aa, Homo sapiens
EVQLVESGGGVVQPGRSLRLSCAASGFTFSSYGMHWVRQAPGKGLEWVAVISYDGSNKYYADSVKGRFTISRDNSKNTLYLQVSSLRAEDTAVYYCVRDLVAAAGTAFDIWGQGTTVTVSS

SEQ ID NO: 773 - protein, 120 aa, Homo sapiens
QVQLQQSGPGLVKPSQTLSLTCAVSGDSVSSNFVAWNWIRQSPSRGLEWLGRTYYRSRWYNDYAVSVQSRIRVTPDTSKNQFSLHLDSVTPEDTAVYYCARGQHSGFDFWGQGTLVTVSS

SEQ ID NO: 774 - protein, 126 aa, Homo sapiens
QVQLVQSGAEVKKPGASVKVSCKASGYTFTSYGISWVRQAPGQGLEWMGWISAYNGNTNYAQKLQGRVTMTTDTSTSTAYMELRSLRSDDTAVYYCARDTPGIAARRYYYYGMDVWGQGTTVTVSS

SEQ ID NO: 775 - protein, 121 aa, Homo sapiens
QVQLVQSGGGVVQPGRSLRLSCAASGFTFSSYPMHWVRQAPGKGLEWMTVISSDGRNKYYPDSVKGRFTISRDNSKNTLYLQMNSLRPEDTAVYYCARGGYHDFWSGPDYWGQGTLVTVSS

SEQ ID NO: 776 - protein, 127 aa, Homo sapiens
EVQLVQSGGGLVQPGGSLRLSCAASGFTFSSYAMSWVRQAPGKGLEWVANIKQDGSEKYYVDSVKGRFTISRDNAKNSLYLQMNSLRAEDTAVYYCARDQVSGITIFGGKWRSPDVWGQGTTVTVSS

SEQ ID NO: 777 - protein, 126 aa, Homo sapiens
QVTLKESGGGVVQPGRSLRLSCAASGFTFTNYGLHWVRQAPGKGLEWVAVISHDGTKKYYADSVKGRFTISRDSSENTLYLQMNSLRPEDSALYYCARDGGYCSGGRCYSYGMDVWGQGTTVTVSS

SEQ ID NO: 778 - protein, 122 aa, Homo sapiens
QVQLVQSGGGVVLPGRSLRLSCVASGFTFRRYGMHWVRQAPGKGLEWVSLISYDGSKTFYGESVKGRFTISRDNSKNTLYLQMNSLRAEDTAVYYCARATVTTDGYYYMDVWGKGTTVTVSS

SEQ ID NO: 779 - protein, 89 aa, Homo sapiens
QSVLTQPPSVSPGQTVTISCGSGVSWYQQPGAPKLLIYNRPSGIPDRFSGSKSGNTASLTITGLQAEDAEEYYCSWDVFGGGTKLTVLG

SEQ ID NO: 780 - protein, 111 aa, Homo sapiens
QPVLTQPRSVSGSPGQSVTISCTGTISDVGGHNFVSWYQQNPGKAPKLIIFEVTKRPAGVPDRFSGSKSGNTASLTVSGLQAEDEGEYYCSSYGGSNDVIFGGGTKLSVLG

SEQ ID NO: 781 - protein, 111 aa, Homo sapiens
QSVLTQPPSVSKGLRQTATLTCTGNSNNVGNQGAAWLQQHQGHPPKLLSYRNNNRPSGISERFSASRSGNTASLTITGLQPEDEADYYCSAWDNRLKTYVFGTGGKVTVLG

SEQ ID NO: 782 - protein, 109 aa, Homo sapiens
SSELTQDPAVSVALGQTVRITCQGDSLRKFFASWYQQKPGQAPVLVIYGKNSRPSGIPDRFSGSNSRNTASLTITGAQAEDEGDYYCNSRDSRDNHQVFGAGTKVTVLS

SEQ ID NO: 783 - protein, 108 aa, Homo sapiens
EIVLTQSPATLSVSPGERATLSCRASQSVNTNLAWYQQKPGQAPRLLIYGASSRATGIPDRFSGSGSGTDFTLTISRLEPEDFAVYYCQHYGSSPLTFGGGTKLEIKR

SEQ ID NO: 784 - protein, 107 aa, Homo sapiens
SSELTQDPAVSVALGQTVRITCQGDSLRSYYASWYQQKPGQAPVLVIYGKNNRPSGIPDRFSGSKSHNTAYLTITGAQAEDEADYFCNSRSGSQRVFGGGTKLTVLG

SEQ ID NO: 785 - protein, 111 aa, Homo sapiens
QSVLTQPPSASGTPGQRVTISCSGSRSNIGSNTVNWYQQLPGTAPKLLIYTNNQRPSGVPDRFSGSKSGTSASLAITGLQAEDEADYYCLSFDSSLTSYVFGTGTKVTVLG

SEQ ID NO: 786 - protein, 112 aa, Homo sapiens
QSVLTQPPSASGTPGQRVTISCSGSRSNIGGNTVNWYQQLPGTAPKLLIYANNQRPSGVPDRFSGSKSGTSASLAISGLRSEDEADYYCAAWDDNLSGHVVFGGGTKLTVLR

SEQ ID NO: 787 - protein, 5 aa, Homo sapiens
SYGMH

SEQ ID NO: 788 - protein, 17 aa, Homo sapiens
VISYDGSNKYYADSVKG

SEQ ID NO: 789 - protein, 12 aa, Homo sapiens
DLVAAAGTAFDI

SEQ ID NO: 790 - protein, 14 aa, Homo sapiens
TGTISDVGGHNFVS

SEQ ID NO: 791 - protein, 7 aa, Homo sapiens
EVTKRPA

SEQ ID NO: 792 - protein, 10 aa, Homo sapiens
SSYGGSNDVI

SEQ ID NO: 793 - protein, 7 aa, Homo sapiens
SNFVAWN

SEQ ID NO: 794 - protein, 18 aa, Homo sapiens
RTYYRSRWYNDYAVSVQS

SEQ ID NO: 795 - protein, 8 aa, Homo sapiens
GQHSGFDF

SEQ ID NO: 796 - protein, 13 aa, Homo sapiens
TGNSNNVGNQGAA

SEQ ID NO: 797 - protein, 7 aa, Homo sapiens
RNNNRPS

SEQ ID NO: 798 - protein, 11 aa, Homo sapiens
SAWDNRLKTYV

SEQ ID NO: 799 - protein, 5 aa, Homo sapiens
SYGIS

SEQ ID NO: 800 - protein, 17 aa, Homo sapiens
WISAYNGNTNYAQKLQG

SEQ ID NO: 801 - protein, 17 aa, Homo sapiens
DTPGIAARRYYYYGMDV

SEQ ID NO: 802 - protein, 11 aa, Homo sapiens
QGDSLRKFFAS

SEQ ID NO: 803 - protein, 7 aa, Homo sapiens
GKNSRPS

SEQ ID NO: 804 - protein, 11 aa, Homo sapiens
NSRDSRDNHQV

SEQ ID NO: 805 - protein, 5 aa, Homo sapiens
SYPMH

SEQ ID NO: 806 - protein, 17 aa, Homo sapiens
VISSDGRNKYYPDSVKG

SEQ ID NO: 807 - protein, 12 aa, Homo sapiens
GGYHDFWSGPDY

SEQ ID NO: 808 - protein, 11 aa, Homo sapiens
RASQSVNTNLA

SEQ ID NO: 809 - protein, 7 aa, Homo sapiens
GASSRAT

SEQ ID NO: 810 - protein, 9 aa, Homo sapiens
QHYGSSPLT

SEQ ID NO: 811 - protein, 5 aa, Homo sapiens
SYAMS

SEQ ID NO: 812 - protein, 17 aa, Homo sapiens
NIKQDGSEKYYVDSVKG

SEQ ID NO: 813 - protein, 18 aa, Homo sapiens
DQVSGITIFGGKWRSPDV

SEQ ID NO: 814 - protein, 11 aa, Homo sapiens
QGDSLRSYYAS

SEQ ID NO: 815 - protein, 7 aa, Homo sapiens
GKNNRPS

SEQ ID NO: 816 - protein, 9 aa, Homo sapiens
NSRSGSQRV

SEQ ID NO: 817 - protein, 5 aa, Homo sapiens
NYGLH

SEQ ID NO: 818 - protein, 17 aa, Homo sapiens
VISHDGTKKYYADSVKG

SEQ ID NO: 819 - protein, 17 aa, Homo sapiens
DGGYCSGGRCYSYGMDV

SEQ ID NO: 820 - protein, 13 aa, Homo sapiens
SGSRSNIGSNTVN

SEQ ID NO: 821 - protein, 7 aa, Homo sapiens
TNNQRPS

SEQ ID NO: 822 - protein, 11 aa, Homo sapiens
LSFDSSLTSYV

SEQ ID NO: 823 - protein, 5 aa, Homo sapiens
RYGMH

SEQ ID NO: 824 - protein, 17 aa, Homo sapiens
LISYDGSKTFYGESVKG

SEQ ID NO: 825 - protein, 13 aa, Homo sapiens
ATVTTDGYYYMDV

SEQ ID NO: 826 - protein, 13 aa, Homo sapiens
SGSRSNIGGNTVN

SEQ ID NO: 827 - protein, 7 aa, Homo sapiens
ANNQRPS

SEQ ID NO: 828 - protein, 12 aa, Homo sapiens
AAWDDNLSGHVV

SEQ ID NO: 829 - protein, 3 aa, Homo sapiens
ELR

SEQ ID NO: 830 - protein, 38 aa, Homo sapiens
MEGISIYTSDNYTEEMGSGDYDSMKEPCFREENANFNK

SEQ ID NO: 831 - protein, 38 aa, Macaca mulatta
MEGISIYTSDNYTEEMGSGDYDSIKEPCFREENANFNR

SEQ ID NO: 832 - protein, 38 aa, Mus musculus
MEPISIYTSDNYSEEVGSGDYDSNKEPCFDEENVHFNR

SEQ ID NO: 833 - protein, 14 aa, Homo sapiens
DAVANWYFGNFLCK

SEQ ID NO: 834 - protein, 14 aa, Macaca mulatta
DAVANWYFGNFLCK

SEQ ID NO: 835 - protein, 14 aa, Mus musculus
DAMADWYFKNFLCK

SEQ ID NO: 836 - protein, 27 aa, Homo sapiens
NVSEADDRYICDRFYPNDLWVVVFQFQ

SEQ ID NO: 837 - protein, 27 aa, Macaca mulatta
SVSEADDRYICDRFYPNDLWVVVFQFQ

SEQ ID NO: 838 - protein, 30 aa, Mus musculus
DVSQGDIAQGRYICDRLYPDSLWMVVFQFQ

SEQ ID NO: 839 - protein, 21 aa, Homo sapiens
DSFILLEIIKQGCEFENTVHK

SEQ ID NO: 840 - protein, 21 aa, Macaca mulatta
DSFILLEIIKQGCEFENTVHK

SEQ ID NO: 841 - protein, 21 aa, Mus musculus
DSFILLGVIKQGCDFESIVHK

SEQ ID NO: 842 - protein, 365 aa, Homo sapiens
MEGISIYTSDNYTEEMGSGDYDSMKEPCFREENANFNKIFLPTIYSIIFLTGIVGNGLVILVMGYQKKLRSMTDKYRLHLSVADLLFVITLPFWAVDAVANWYFGNFLCKAVHVIYTVNLYSSVLILAFISLDRYLAIVHATNSQRPRKLLAEKVVYVGVWIPALLLTIPDFIFANVSEADDRYICDRFYPNDLWVVVFQFQHIMVGLILPGIVILSCYCIIISKLSHSKGHQKRKALKTTVILILAFFACWLPYYIGISIDSFILLEIIKQGCEFENTVHKWISITEALAFFHCCLNPILYAFLGAKFKTSAQHALTSVSRGSSLKILSKGKRGGHSSVSTESESSSFHSSGTETSQVAPALES

SEQ ID NO: 843 - protein, 341 aa, Homo sapiens
MEPCFREENANFNKIFLPTIYSIIFLTGIVGNGLVILVMGYQKKLRSMTDKYRLHLSVADLLFVITLPFWAVDAVANWYFGNFLCKAVHVIYTVNLYSSVLILAFISLDRYLAIVHATNSQRPRKLLAEKVVYVGVWIPALLLTIPDFIFANVSEADDRYICDRFYPNDLWVVVFQFQHIMVGLILPGIVILSCYCIIISKLSHSKGHQKRKALKTTVILILAFFACWLPYYIGISIDSFILLEIIKQGCEFENTVHKWISITEALAFFHCCLNPILYAFLGAKFKTSAQHALTSVSRGSSLKILSKGKRGGHSSVSTESESSSFHSSGTETSQVAPALES

SEQ ID NO: 844 - protein, 334 aa, Homo sapiens
ENANFNKIFLPTIYSIIFLTGIVGNGLVILVMGYQKKLRSMTDKYRLHLSVADLLFVITLPFWAVDAVANWYFGNFLCKAVHVIYTVNLYSSVLILAFISLDRYLAIVHATNSQRPRKLLAEKVVYVGVWIPALLLTIPDFIFANVSEADDRYICDRFYPNDLWVVVFQFQHIMVGLILPGIVILSCYCIIISKLSHSKGHQKRKALKTTVILILAFFACWLPYYIGISIDSFILLEIIKQGCEFENTVHKWISITEALAFFHCCLNPILYAFLGAKFKTSAQHALTSVSRGSSLKILSKGKRGGHSSVSTESESSSFHSSGTETSQVAPALES

SEQ ID NO: 845 - protein, 121 aa, Homo sapiens
QVQLVQSGGGLVQPGGSLRLSCAASGFTFSSYAMSWVRQAPGKGLEWVSAISGSGGSTYYADSVKGRFTISRDNSKNTLYLQMNSLRAEDTAVYYCARNGNYRGSLAFDIWGQGTLVTVSS

SEQ ID NO: 846 - protein, 113 aa, Homo sapiens
QSVLTQPPSVSGAPGQRVTISCTGSSSNIGAGYDVHWYQQLPGTAPKLLIYGNNNRPSGVPDRFSGSKSGTSASLAITGLQAEDEADYYCQSYDSSLSAWVVFGGGTKLTVLG

SEQ ID NO: 847 - protein, 119 aa, Homo sapiens
EVQLVQSGGGVVQPGGSLRLSCAASGFPFSSYAMSWVRQAPGKGLEWVSAISANGGTTYYADSVKGRFTISRDNSKNTLYLQMNSLRAEDTAVYYCANNGNYRGAFDIWGQGTMVTVSS

SEQ ID NO: 848 - protein, 119 aa, Homo sapiens
QVQLVQSGGGLVQPGGSLRLSCAASGFPFSSYAMSWVRQAPGKGLEWVSAISANGGTTYYADSVKGRFTISRDNSKNTLYLQMNSLRAEDTAVYYCANNGNYRGAFDIWGQGTMVTVSS

SEQ ID NO: 849 - protein, 119 aa, Homo sapiens; identical to SEQ ID NO: 848

SEQ ID NO: 850 - protein, 119 aa, Homo sapiens
QVQLVQSGGGLVQPGGSLRLSCAASEFTFGTYAMTWVRQAPGKGLEWVSAVSGSGGSTYYADSVKGRFTISRDNSRNTLYLQMNSLRADDTAVYYCARGPVLRYGFDIWGQGTMVTVSS

SEQ ID NO: 851 - protein, 119 aa, Homo sapiens
QVQLVQSGGGVVQPGGSLRLSCAASGFPFSSYAMSWVRQAPGKGLEWVSAISANGGTTYYADSVKGRFTISRDNSKNTLYLQMNSLRAEDTAVYYCANNGNYRGAFDIWGQGTMVTVSS

SEQ ID NO: 852 - protein, 118 aa, Homo sapiens
QVQLQESGGGLVQPGGSLRLSCAASGFTFSIYAMSWVRQAPGKGLEWVSAISGSGGGTYHADSVKGRFTISRDNSKNTLYLQMNSLRAEDTAVYYCAKFSAYSGYDLWGQGTLVTVSS

SEQ ID NO: 853 - protein, 119 aa, Homo sapiens
QVQLVQSGGGLVRPGGSLRLSCAASGFPFSSYAMSWVRQAPGKGLEWVSAISANGGTTYYADSVKGRFTISRDNSKNTLYLQMNSLRAEDTAVYYCANNGNYRGAFDIWGQGTTVTVSS

SEQ ID NO: 854 - protein, 119 aa, Homo sapiens; identical to SEQ ID NO: 848

SEQ ID NO: 855 - protein, 119 aa, Homo sapiens
EVQLVQSGGGLVQPGGSLRLSCAASGFTFSSYAMSWVRQAPGKGLEWVSAISANGGTTYYADSVKGRFTISRDNSKNTLYLQMNSLRAEDTAVYYCANNGNYRGAFDIWGQGTTVTVSS

SEQ ID NO: 856 - protein, 116 aa, Homo sapiens
QVQLVQSGGGLVQPGGSLRLSCAASGFTFSSYAMSWVRQAPGKGLEWVSAISGSGGSTYYADSVKGRFTISRDNSKNTLYLQMNSLRAEDTAVYYCARAAAGFDYWGQGTLVTVSS

SEQ ID NO: 857 - protein, 119 aa, Homo sapiens
QVQLQESGGGLVQPGGSLRLSCAASGFTFSSYAMSWVRQAPGKGLEWVSAISGSGGSTYYADSVKGRFTISRDNSKNTLYLQMNSLRAEDTAVYYCAKIGRYSSSLGYWGQGTLVTVSS

SEQ ID NO: 858 - protein, 122 aa, Homo sapiens
QVQLVQSGGGVVQPGRSLRLSCAASGFTFSSYGMHWVRQAPGKGLEWVAVISYDGSNKYYADSVKGRFTISRDNSKNTLYLQMNSLRAEDTAVYYCAREAPYSSSLDAFDIWGQGTMVTVSS

SEQ ID NO: 859 - protein, 118 aa, Homo sapiens
QVQLQESGGGLVQPGGSLRLSCAASGFTFSSYAMSWVRQAPGKGLEWVSAISGSGGSTYYADSVKGRFTISRDNSKNTLYLQMNSLRAEDTAVYYCARSHSSGGFDYWGQGTLVTVSS

SEQ ID NO: 860 - protein, 118 aa, Homo sapiens; identical to SEQ ID NO: 859

SEQ ID NO: 861 - protein, 116 aa, Homo sapiens
QVTLKESGGGVVQPGTSLRLSCAASGFTFSNYAMTWVRQAPGKGLEWVGLISYDGSVTHYTDSVKGRFTISRDNAKNSLYLQMNTLRADDTAVYYCARGSGYQEHWGQGTLVTVSS

SEQ ID NO: 862 - protein, 118 aa, Homo sapiens
QVQLVQSGGGLVQPGGSLRLSCAASGFTFSSYAMSWVRQAPGKGLEWVSAISGSGGSTYYADSVKGRFTISRDNSKNTLYLQMNSLRAEDTAVYYCATYGDYGSLDYWGQGTLVTVSS

SEQ ID NO: 863 - protein, 122 aa, Homo sapiens
QVQLVQSGGGLVQPGGSLRLSCAASGFTFSSYAMSWVRQAPGKGLEWVSAISGSGVSTYYADSVKGRFTISRDNSKNTLYLQMNSLRAEDTAVYYCAKYCSSTSCYRGMDVWGKGTLVTVSS

SEQ ID NO: 864 - protein, 119 aa, Homo sapiens
QVQLVQSGGGVVQPGRSLRLSCAASGFTFSSYGMHWVRQAPGKGLEWVAVISYDGSNKYYADSVKGRFTISRDNSKNTLYLQMNSLRAEDTAVYYCARGRAARPPFDYWGQGTLVTVSS

SEQ ID NO: 865 - protein, 119 aa, Homo sapiens; identical to SEQ ID NO: 851

SEQ ID NO: 866 - protein, 121 aa, Homo sapiens
QVQLVQSGGGLVQPGGSLRLSCAAPEFTFSKYAMSWVRQAPGKGLEWVSGISGSGGSTYYADSVKGRFTISRDNSKNTLYLQMNSLRAEDTAVYYCAKSSRSGYFLPLDYWGQGTLVTVSS

SEQ ID NO: 867 - protein, 118 aa, Homo sapiens
EVQLVESGGGVVQPGRSLRLSCAASGFTFSSYGMHWVRQAPGKGLEWVSAISGSGGSTYYADSVKGRFTISRDNAKNTLYLQMNSLRAEDTAVYYCARAAVTGGFDPWGQGTLVTVSS

SEQ ID NO: 868 - protein, 112 aa, Homo sapiens
QSVLTQPPSVSGAPGQRVTISCTGSSSNIGAGFDVHWYQQLPGTAPKLLIYGNTNRPSGVPDRFSGSKSGTSASLAITGLQAEDETDYYCQSYDSRLSAWVFGGGTKLTVLG

SEQ ID NO: 869 - protein, 111 aa, Homo sapiens
QSVLTQPPSVSGAPGQRVTISCTGSSSNIGAGYDVHWYQQLPGTAPKLLIYGNSNRPSGVPDRFSGSKSGSSASLAITGLQAEDEAHYYCQSYDRSLSWVFGGGTKLTVLG

SEQ ID NO: 870 - protein, 112 aa, Homo sapiens
QSVLTQPPSVSGAPGQRVTISCTGSSSNIGAGYDVHWYQQLPGTAPKLLIYGNTNRPSGVPDRFSGSKSGTSASLAIIGLQADDEADYYCQSYDSTLRVWMFGGGTKLTVLG

SEQ ID NO: 871 - protein, 112 aa, Homo sapiens
QSVLTQPPSVSGAPGQRITISCTGSRSNIGADYDVHWYQQLPGTAPKLLIYANNNRPSGVPGRFSASKSGTSASLAISGLQAEDEADYYCQSYDSSLRAWVFGGGTKLAVLG

SEQ ID NO: 872 - protein, 112 aa, Homo sapiens
QSVLTQPPSVSGAPGQRITISCTGSRSNIGADYDVHWYQQLPGTAPKLLIYANNNRPSGVPDRFSGSKSGTSASLAITGLQAEDETDYFCQSYDSSLSAWVFGGGTKVTVLG

SEQ ID NO: 873 - protein, 111 aa, Homo sapiens
QSVLTQPPSVSGAPGQRVTISCTGSSSNIGRGYNVHWYQQLPGTAPKLLIYDNTNRPSGVPARFSGSKSATSASLTITGLQADDEADYYCQSYDSGLRWVFGGGTKLTLLG

SEQ ID NO: 874 - protein, 111 aa, Homo sapiens
QSVLTQPPSVSGAPGQRITISCTGSSSNIGAGYDVHWYQQVPGKAPKVVIYGNNNRPSGVPDRFSGSKSGASASLAITGLQTEDEADYYCQSYDKSLTWVFGGGTKVTVLG

SEQ ID NO: 875 - protein, 111 aa, Homo sapiens
QSVLTQPPSVSGAPGQRITISCTGTSSNIGAGYDVHWYQQLPGAAPRVLIYGNNNRPSGVPDRFSGSKSGTSASLAITGLQSEDEADYYCQSYDKSLSWVFGGGTKLTVLR

SEQ ID NO: 876 - protein, 112 aa, Homo sapiens
QSVLTQPPSVSGAPGQRVTISCTGSSSNIGAGFDVHWYQQLPGTAPRLLIYGNNNRPSGVPDRFSGSKSGTSASLAITGLQAEDETDYFCQSYDSSLSAWVFGGGTKVTVLR

SEQ ID NO: 877 - protein, 112 aa, Homo sapiens
QSVLTQPPSVSGAPGQRVTISCTGSSSNIGRGYNVHWYQQLPGTAPKLLIYDDTNRPSGVPHRFSGSKSGTSASLAITGLQAEDEADYYCQSYDSSLRAWVFGGGTKLAVLG

SEQ ID NO: 878 - protein, 111 aa, Homo sapiens
QSVLTQPPSVSGAPGQRVTISCTGSSSNIGRGYNVHWYQQLPGTAPKLLIYDNTNRPSGVPARFSGSKSATSASLAITGLQADDEADYYCQSYDSGLRWVFGGGTKLTLLR

SEQ ID NO: 879 - protein, 111 aa, Homo sapiens
QSVLTQPPSVSGAPGQRVTISCTGSSSNIGRGYNVHWYQQLPGTAPKLLIYGNSNRPSGVPDRFSGSSSGNTASLTITGAQAEDEADYYCHSRDNNGHHIFGGGTKLTVLS

SEQ ID NO: 880 - protein, 112 aa, Homo sapiens
QSVLTQPPSVSGAPGQRVTISCTGSSSNIGRGYNVHWYQQLPGTAPKLLIYGNTNRPSGVPDRFSGSKSGTSASLAITGLQAEDEGDYYCQSYDSSLSAWVFGGGTKLTVLG

SEQ ID NO: 881 - protein, 112 aa, Homo sapiens
  MOD_RES (83)..(83): Any naturally occurring amino acid
QSVLTQPPSVSGAPGQRVTISCTGSSSNIGRGYNVHWYQQLPGTAPKLLIYGNTNRPSGVPDRFSGSKSGTSASLAITGLQAXDEGDYYCQSYDSSLSAWVFGGGTKLTVLG

SEQ ID NO: 882 - protein, 110 aa, Homo sapiens
LPVLTQPPSVSVAPGQTARITCGGNNIGSKSVHWYQQKPGQAPVLVIYYDSDRPSGIPERFSGSNSGNTATLTISRVEAGDEADYYCQVWDSSSDHHVVFGGGTKLTVLG

SEQ ID NO: 883 - protein, 112 aa, Homo sapiens
QSVLTQPPSVSGAPGQRVTISCTGSSSNIGAGYDVHWYQQLPGTAPKLLIYANNNRPSGVPDRFSGSKSGTSASLAITGLQAEDEADYYCQSYDSSLRAWVFGGGTKLAVLG

SEQ ID NO: 884 - protein, 112 aa, Homo sapiens; identical to SEQ ID NO: 883

SEQ ID NO: 885 - protein, 111 aa, Homo sapiens
QPVLTQPPSASGTPGQRVTISCSGSSSNIGSNYVYWYQQLPGTAPKLPIYRNNQRPSGVPDRFSGSKSGTSASLAISGLRSEDEADYYCAAWDDSLNGVVFGGGTKLTVLR

SEQ ID NO: 886 - protein, 112 aa, Homo sapiens
QSVLTQPPSVSGAPGQRVTISCTGSSSNIGAGYDVHWYQHLPGTAPKLLIYGNSNRPSGVPDRFSGSKSGTSASLAITGLQAEDETDYFCQSYDSSLSAWVFGGGTKVTVLG

SEQ ID NO: 887 - protein, 109 aa, Homo sapiens
SSELTQDPAVSVALGQTVRITCQGNSLRYYYPSWYQQKPGQAPVLVIYGKNNRPSGIPDRFSGSSSGNTASLTITGTQAEDEADYYCSSRDNTDNRVVFGGGTKLTVLG

SEQ ID NO: 888 - protein, 109 aa, Homo sapiens
QPGLTQPPSVSVAPGQTARITCGGDNIGRKSVHWYQQRPGQAPILVIRDDRDRPSGIPERFSGSSSVNTATLIISRVEAGDEADYYCQVWDSSSKHYVFGPGTKVTALG

SEQ ID NO: 889 - protein, 458 aa, Homo sapiens
MAPLCPSPWLPLLIPAPAPGLTVQLLLSLLLLMPVHPQRLPRMQEDSPLGGGSSGEDDPLGEEDLPSEEDSPREEDPPGEEDLPGEEDLPGEEDLPEVKPKSEEEGSLKLEDLPTVEAPGDPQEPQNNAHRDKEGDDQSHWRYGGDPPWPRVSPACAGRFQSPVDIRPQLAAFCPALRPLELLGFQLPPLPELRLRNNGHSVQLTLPPGLEMALGPGREYALQLHLHWGAAGRPGSEHTVEGHRFPAEIHVVHLSTAFARVDEALGRPGGLAVLAAFLEEGPEENSAYEQLLSRLEEIAEEGSETQVPGLDISALLPSDFSRYFQYEGSLTTPPCAQGVIWTVFNQTVMLSAKQLHTLSDTLWGPGDSRLQLNFRATQPLNGRVIEASFPAGVDSSPRAAEPVQLNSCLAAGDILALVFGLLFAVTSVAFLVQMRRQHRRGTKGGVSYRPAEVAETGA

SEQ ID NO: 890 - protein, 437 aa, Mus musculus
MASLGPSPWAPLSTPAPTAQLLLFLLLQVSAQPQGLSGMQGEPSLGDSSSGEDELGVDVLPSEEDAPEEADPPDGEDPPEVNSEDRMEESLGLEDLSTPEAPEHSQGSHGDEKGGGHSHWSYGGTLLWPQVSPACAGRFQSPVDIRLERTAFCRTLQPLELLGYELQPLPELSLSNNGHTVQLTLPPGLKMALGPGQEYRALQLHLHWGTSDHPGSEHTVNGHRFPAEIHVVHLSTAFSELHEALGRPGGLAVLAAFLQESPEENSAYEQLLSHLEEISEEGSKIEIPGLDVSALLPSDFSRYYRYEGSLTTPPCSQGVIWTVFNETVKLSAKQLHTLSVSLWGPRDSRLQLNFRATQPLNGRTIEASFPAAEDSSPEPVHVNSCFTAGDILALVFGLLFAVTSIAFLLQLRRQHRHRSGTKDRVSYSPAEMTETGA

SEQ ID NO: 891 - DNA, 38 bp, Artificial Sequence
  Description of Artificial Sequence: Synthetic Chemically synthesized primer
atcgacgcgtgcctgagcgaggtgcagctggtgcagtc

SEQ ID NO: 892 - DNA, 32 bp, Artificial Sequence
  Description of Artificial Sequence: Synthetic Chemically synthesized primer
caatggtcaccgtctcttcagctagcaccagg

SEQ ID NO: 893 - DNA, 35 bp, Artificial Sequence
  Description of Artificial Sequence: Synthetic Chemically synthesized primer
atcccaagcttaagccagtctgtgctgactcagcc

SEQ ID NO: 894 - DNA, 31 bp, Artificial Sequence
  Description of Artificial Sequence: Synthetic Chemically synthesized primer
ggagggaccaaattgaccgtcctaggtcagc

SEQ ID NO: 895 - DNA, 41 bp, Artificial Sequence
  Description of Artificial Sequence: Synthetic Chemically synthesized primer
tagggcacgcgtgtgctgagcgaggtgcagctggtgcagtc

SEQ ID NO: 896 - DNA, 32 bp, Artificial Sequence
  Description of Artificial Sequence: Synthetic Chemically synthesized primer
tctagtgctagctgaagagacggtgaccattg

SEQ ID NO: 897 - DNA, 35 bp, Artificial Sequence
  Description of Artificial Sequence: Synthetic Chemically synthesized primer
ctagcaagcttatcccagtctgtgctgactcagcc

SEQ ID NO: 898 - DNA, 26 bp, Artificial Sequence
  Description of Artificial Sequence: Synthetic Chemically synthesized primer
atagcacctaggacggtcagcttggt

SEQ ID NO: 899 - protein, 5 aa, Artificial Sequence
  Description of Artificial Sequence: Synthetic Portion of CDR1 heavy chain sequence
SYAMS

SEQ ID NO: 900 - protein, 5 aa, Artificial Sequence
  Description of Artificial Sequence: Synthetic Portion of CDR1 heavy chain sequence
  MOD_RES (1)..(1): Any naturally occurring amino acid
  MOD_RES (5)..(5): Any naturally occurring amino acid
XYAMX

SEQ ID NO: 901 - protein, 5 aa, Artificial Sequence
  Description of Artificial Sequence: Synthetic Portion of CDR1 heavy chain sequence
  MOD_RES (3)..(3): Any naturally occurring amino acid
  MOD_RES (5)..(5): Any naturally occurring amino acid
SYXMX

SEQ ID NO: 902 - protein, 17 aa, Artificial Sequence
  Description of Artificial Sequence: Synthetic Portion of CDR2 heavy chain sequence
  MOD_RES (4)..(5): Any naturally occurring amino acid
  MOD_RES (8)..(8): Any naturally occurring amino acid
  MOD_RES (10)..(11): Any naturally occurring amino acid
AISXXGGXTXXADSVKG

SEQ ID NO: 903 - protein, 17 aa, Artificial Sequence
  Description of Artificial Sequence: Synthetic Portion of CDR2 heavy chain sequence
AISGSGGSTTTADSVKG

SEQ ID NO: 904 - protein, 13 aa, Artificial Sequence
  Description of Artificial Sequence: Synthetic Portion of CDR3 heavy chain sequence
  MOD_RES (9)..(9): Any naturally occurring amino acid
NGNYRGSLXAFDI

SEQ ID NO: 905 - protein, 14 aa, Artificial Sequence
  Description of Artificial Sequence: Synthetic Portion of CDR1 light chain sequence
TGSSSNIGAGYDVH

SEQ ID NO: 906 - protein, 7 aa, Artificial Sequence
  Description of Artificial Sequence: Synthetic Portion of CDR2 light chain sequence
GNNNRPS

SEQ ID NO: 907 - protein, 12 aa, Artificial Sequence
  Description of Artificial Sequence: Synthetic Portion of CDR3 light chain sequence
QSYDSSLSAWVV

SEQ ID NO: 908 - protein, 6 aa, Artificial Sequence
  Description of Artificial Sequence: Synthetic Consensus sequence
EEDLPE

SEQ ID NO: 909 - protein, 10 aa, Artificial Sequence
  Description of Artificial Sequence: Synthetic Portion of the CDR3 heavy chain sequence
NGNYRGAFDI

SEQ ID NO: 910 - protein, 5 aa, Artificial Sequence
  Description of Artificial Sequence: Synthetic variable heavy chain, CDR1
TYAMT

SEQ ID NO: 911 - protein, 5 aa, Artificial Sequence
  Description of Artificial Sequence: Synthetic variable heavy chain, CDR1
IYAMS

SEQ ID NO: 912 - protein, 5 aa, Artificial Sequence
  Description of Artificial Sequence: Synthetic variable heavy chain, CDR1
SYGMH

SEQ ID NO: 913 - protein, 5 aa, Artificial Sequence
  Description of Artificial Sequence: Synthetic variable heavy chain, CDR1
NYAMT

SEQ ID NO: 914 - protein, 5 aa, Artificial Sequence
  Description of Artificial Sequence: Synthetic variable heavy chain, CDR1
KYAMS

SEQ ID NO: 915 - protein, 17 aa, Artificial Sequence
  Description of Artificial Sequence: Synthetic variable heavy chain, CDR2
AISANGGTTYYADSVKG

SEQ ID NO: 916 - protein, 17 aa, Artificial Sequence
  Description of Artificial Sequence: Synthetic variable heavy chain, CDR2
AVSGSGGSTYYADSVKG

SEQ ID NO: 917 - protein, 17 aa, Artificial Sequence
  Description of Artificial Sequence: Synthetic variable heavy chain, CDR2
AISGSGGGTYHADSVKG

SEQ ID NO: 918 - protein, 17 aa, Artificial Sequence
  Description of Artificial Sequence: Synthetic variable heavy chain, CDR2
AISGSGGSTYYADSVKG

SEQ ID NO: 919 - protein, 17 aa, Artificial Sequence
  Description of Artificial Sequence: Synthetic variable heavy chain, CDR2
VISYDGSNKYYADSVKG

SEQ ID NO: 920 - protein, 17 aa, Artificial Sequence
  Description of Artificial Sequence: Synthetic variable heavy chain, CDR2
LISYDGSVTHYTDSVKG

SEQ ID NO: 921 - protein, 17 aa, Artificial Sequence
  Description of Artificial Sequence: Synthetic variable heavy chain, CDR2
AISGSGVSTYYADSVKG

SEQ ID NO: 922 - protein, 17 aa, Artificial Sequence
  Description of Artificial Sequence: Synthetic variable heavy chain, CDR2
GISGSGGSTYYADSVKG

SEQ ID NO: 923 - protein, 10 aa, Artificial Sequence
  Description of Artificial Sequence: Synthetic variable heavy chain, CDR3
GPVLRYGFDI

SEQ ID NO: 924 - protein, 9 aa, Artificial Sequence
  Description of Artificial Sequence: Synthetic variable heavy chain, CDR3
FSAYSGYDL

SEQ ID NO: 925 - protein, 7 aa, Artificial Sequence
  Description of Artificial Sequence: Synthetic variable heavy chain, CDR3
AAAGFDY

SEQ ID NO: 926 - protein, 10 aa, Artificial Sequence
  Description of Artificial Sequence: Synthetic variable heavy chain, CDR3
IGRYSSSLGY

SEQ ID NO: 927 - protein, 13 aa, Artificial Sequence
  Description of Artificial Sequence: Synthetic variable heavy chain, CDR3
EAPYSSSLDAFDI

SEQ ID NO: 928 - protein, 9 aa, Artificial Sequence
  Description of Artificial Sequence: Synthetic variable heavy chain, CDR3
SHSSGGFDY

SEQ ID NO: 929 - protein, 7 aa, Artificial Sequence
  Description of Artificial Sequence: Synthetic variable heavy chain, CDR3
GSGYQEH

SEQ ID NO: 930 - protein, 9 aa, Artificial Sequence
  Description of Artificial Sequence: Synthetic variable heavy chain, CDR3
YGDYGSLDY

SEQ ID NO: 931 - protein, 13 aa, Artificial Sequence
  Description of Artificial Sequence: Synthetic variable heavy chain, CDR3
YCSSTSCYRGMDV

SEQ ID NO: 932 - protein, 10 aa, Artificial Sequence
  Description of Artificial Sequence: Synthetic variable heavy chain, CDR3
GRAARPPFDY

SEQ ID NO: 933 - protein, 12 aa, Artificial Sequence
  Description of Artificial Sequence: Synthetic variable heavy chain, CDR3
SSRSGYFLPLDY

SEQ ID NO: 934 - protein, 9 aa, Artificial Sequence
  Description of Artificial Sequence: Synthetic variable heavy chain, CDR3
AAVTGGFDP

SEQ ID NO: 935 - protein, 14 aa, Artificial Sequence
  Description of Artificial Sequence: Synthetic variable light chain, CDR3
TGSSSNIGAGYDVH

SEQ ID NO: 936 - protein, 14 aa, Artificial Sequence
  Description of Artificial Sequence: Synthetic variable light chain, CDR1
TGSRSNIGADYDVH

SEQ ID NO: 937 - protein, 14 aa, Artificial Sequence
  Description of Artificial Sequence: Synthetic variable light chain, CDR1
TGSSSNIGRGYNVH

SEQ ID NO: 938 - protein, 14 aa, Artificial Sequence
  Description of Artificial Sequence: Synthetic variable light chain, CDR1
TGTSSNIGAGYDVH

SEQ ID NO: 939 - protein, 11 aa, Artificial Sequence
  Description of Artificial Sequence: Synthetic variable light chain, CDR1
GGNNIGSKSVH

SEQ ID NO: 940 - protein, 13 aa, Artificial Sequence
  Description of Artificial Sequence: Synthetic variable light chain, CDR1
SGSSSNIGSNYVY

SEQ ID NO: 941 - protein, 11 aa, Artificial Sequence
  Description of Artificial Sequence: Synthetic variable light chain, CDR1
QGNSLRYYYPS

SEQ ID NO: 942 - protein, 11 aa, Artificial Sequence
  Description of Artificial Sequence: Synthetic variable light chain, CDR1
GGDNIGRKSVH

SEQ ID NO: 943 - protein, 7 aa, Artificial Sequence
  Description of Artificial Sequence: Synthetic variable light chain, CDR2
GNSNRPS

SEQ ID NO: 944 - protein, 7 aa, Artificial Sequence
  Description of Artificial Sequence: Synthetic variable light chain, CDR2
ANNNRPS

SEQ ID NO: 945 - protein, 7 aa, Artificial Sequence
  Description of Artificial Sequence: Synthetic variable light chain, CDR2
DNTNRPS

SEQ ID NO: 946 - protein, 7 aa, Artificial Sequence
  Description of Artificial Sequence: Synthetic variable light chain, CDR2
GNNNRPS

SEQ ID NO: 947 - protein, 7 aa, Artificial Sequence
  Description of Artificial Sequence: Synthetic variable light chain, CDR2
DDTNRPS

SEQ ID NO: 948 - protein, 7 aa, Artificial Sequence
  Description of Artificial Sequence: Synthetic variable light chain, CDR2
YDSDRPS

SEQ ID NO: 949 - protein, 7 aa, Artificial Sequence
  Description of Artificial Sequence: Synthetic variable light chain, CDR2
RNNQRPS

SEQ ID NO: 950 - protein, 7 aa, Artificial Sequence
  Description of Artificial Sequence: Synthetic variable light chain, CDR2
GKNNRPS

SEQ ID NO: 951 - protein, 7 aa, Artificial Sequence
  Description of Artificial Sequence: Synthetic variable light chain, CDR2
DDRDRPS

SEQ ID NO: 952 - protein, 11 aa, Artificial Sequence
  Description of Artificial Sequence: Synthetic variable light chain, CDR3
QSYDSRLSAWV

SEQ ID NO: 953 - protein, 10 aa, Artificial Sequence
  Description of Artificial Sequence: Synthetic variable light chain, CDR3
QSYDRSLSWV

SEQ ID NO: 954 - protein, 11 aa, Artificial Sequence
  Description of Artificial Sequence: Synthetic variable light chain, CDR3
QSYDSTLRVWM

SEQ ID NO: 955 - protein, 11 aa, Artificial Sequence
  Description of Artificial Sequence: Synthetic variable light chain, CDR3
QSYDSSLRAWV

SEQ ID NO: 956 - protein, 11 aa, Artificial Sequence
  Description of Artificial Sequence: Synthetic variable light chain, CDR3
QSYDSSLSAWV

SEQ ID NO: 957 - protein, 10 aa, Artificial Sequence
  Description of Artificial Sequence: Synthetic variable light chain, CDR3
QSYDSGLRWV

SEQ ID NO: 958 - protein, 10 aa, Artificial Sequence
  Description of Artificial Sequence: Synthetic variable light chain, CDR3
QSYDKSLTWV

SEQ ID NO: 959 - protein, 10 aa, Artificial Sequence
  Description of Artificial Sequence: Synthetic variable light chain, CDR3
QSYDKSLSWV

SEQ ID NO: 960 - protein, 11 aa, Artificial Sequence
  Description of Artificial Sequence: Synthetic variable light chain, CDR3
QSYDSSLSAWV

SEQ ID NO: 961 - protein, 10 aa, Artificial Sequence
  Description of Artificial Sequence: Synthetic variable light chain, CDR3
HSRDNNGHHI

SEQ ID NO: 962 - protein, 12 aa, Artificial Sequence
  Description of Artificial Sequence: Synthetic variable light chain, CDR3
QVWDSSSDHHVV

SEQ ID NO: 963 - protein, 11 aa, Artificial Sequence
  Description of Artificial Sequence: Synthetic variable light chain, CDR3
AAWDDSLNGVV

SEQ ID NO: 964 - protein, 11 aa, Artificial Sequence
  Description of Artificial Sequence: Synthetic variable light chain, CDR3
SSRDNTDNRVV

SEQ ID NO: 965 - protein, 11 aa, Artificial Sequence
  Description of Artificial Sequence: Synthetic variable light chain, CDR3
QVWDSSSKHYV

SEQ ID NO: 966 - DNA, 354 bp, Homo sapiens
caggtgcagctggtgcagagcggagccgaggtgaagaagcctggagcttccgtcaaggtgtcctgcaaggccagcggctacaccttcgccagctactacatgcactggatgcggcaggcacctggacagggcctcgaatggatcggctggatcaaccccggcaacgtgaacaccaagtacaacgagaagttcaagggcagggccaccctgaccgtggacaccagcaccaacaccgcctacatggaactgagcagcctgcggagcgaggacaccgccgtgtactactgcgccagaagcacctactaccggcccctggactactggggccagggcaccctggtgaccgtgagcagc

SEQ ID NO: 967 - protein, 118 aa, Homo sapiens
QVQLVQSGAEVKKPGASVKVSCKASGYTFASYYMHWMRQAPGQGLEWIGWINPGNVNTKYNEKFKGRATLTVDTSTNTAYMELSSLRSEDTAVYYCARSTYYRPLDYWGQGTLVTVSS

SEQ ID NO: 968 - DNA, 336 bp, Homo sapiens
gacatcgtgatgacccagagccccgacagcctggccgtgagcctgggcgagcgggccaccatcaactgcaagagcagccagagcatcctgtacagcagcaaccagaagaactacctggcctggtatcagcagaagcccggccagagccccaagctgctgatctactgggccagcacccgggagagcggcgtgcccgaccggtttagcggcagcggctccggcaccgacttcaccctgaccatcagcagcctgcaggccgaggacgtggccgtgtactactgccaccagtacctgagcagctacaccttcggccagggcacaaagctggaaatcaag

SEQ ID NO: 969 - protein, 112 aa, Homo sapiens
DIVMTQSPDSLAVSLGERATINCKSSQSILYSSNQKNYLAWYQQKPGQSPKLLIYWASTRESGVPDRFSGSGSGTDFTLTISSLQAEDVAVYYCHQYLSSYTFGQGTKLEIK

SEQ ID NO: 970 - protein, 8 aa, Homo sapiens
GYTFASYY

SEQ ID NO: 971 - protein, 17 aa, Homo sapiens
WINPGNVNTKYNEKFKG

SEQ ID NO: 972 - protein, 9 aa, Homo sapiens
STYYRPLDY

SEQ ID NO: 973 - protein, 17 aa, Homo sapiens
KSSQSILYSSNQKNYLA

SEQ ID NO: 974 - protein, 7 aa, Homo sapiens
WASTRES

SEQ ID NO: 975 - protein, 8 aa, Homo sapiens
HQYLSSYT

SEQ ID NO: 976 - protein, 17 aa, Homo sapiens
  MOD_RES (4)..(5): Any naturally occurring amino acid
  MOD_RES (7)..(7): Any naturally occurring amino acid
  MOD_RES (9)..(9): Any naturally occurring amino acid
WINXXNXNXKYNEKFKG

SEQ ID NO: 977 - protein, 9 aa, Homo sapiens
  MOD_RES (2)..(2): Any naturally occurring amino acid
  MOD_RES (4)..(5): Any naturally occurring amino acid
  MOD_RES (9)..(9): Any naturally occurring amino acid
SXYXXPLDX

SEQ ID NO: 978 - protein, 17 aa, Homo sapiens
  MOD_RES (6)..(6): Any naturally occurring amino acid
  MOD_RES (10)..(13): Any naturally occurring amino acid
KSSQSXLYSXXXXNYLA

SEQ ID NO: 979 - protein, 7 aa, Homo sapiens
  MOD_RES (4)..(5): Any naturally occurring amino acid
WASXXES

SEQ ID NO: 980 - protein, 8 aa, Homo sapiens
  MOD_RES (5)..(6): Any naturally occurring amino acid
HQYLXXYT

SEQ ID NO: 981 - DNA, 369 bp, Homo sapiens
caggtgcagctggtgcagtctggggctgaggtgaagaagcctgggtcctcggtgaaggtctcctgcaaggcttctggaggcaccttcagtgacaatgctatcagctgggtgcgacaggccccaggacaagggcttgagtggatggggggcatcattcctatctttggaaaaccaaactacgcacagaagttccagggcagagtcacgattactgcggacgaatccacgagcacagcctacatggacctgaggagcctgagatctgaggacacggccgtttattactgtgcgagagattcagacgcgtattactatggttcggggggtatggacgtctggggccaaggcaccctggtcaccgtctcctca

SEQ ID NO: 982 - protein, 123 aa, Homo sapiens
QVQLVQSGAEVKKPGSSVKVSCKASGGTFSDNAISWVRQAPGQGLEWMGGIIPIFGKPNYAQKFQGRVTITADESTSTAYMDLRSLRSEDTAVYYCARDSDAYYYGSGGMDVWGQGTLVTVSS

SEQ ID NO: 983 - DNA, 335 bp, Homo sapiens
ctgcctgtgctgactcaatcatcctctgcctctgcttccctgggatcctcggtcaagctcacctgcactctgagcagtgggcatagtaactacatcatcgcatggcatcaacagcagccagggaaggcccctcggtacttgatgaaggttaatagtgatggcagccacaccaagggggacgggatccctgatcgcttctcaggctccagctctggggctgaccgctacctcaccatctccaacctccagtctgaggatgaggctagttatttctgtgagacctgggacactaagattcatgtcttcggaactgggaccaaggtctccgtcctcag

SEQ ID NO: 984 - protein, 111 aa, Homo sapiens
LPVLTQSSSASASLGSSVKLTCTLSSGHSNYIIAWHQQQPGKAPRYLMKVNSDGSHTKGDGIPDRFSGSSSGADRYLTISNLQSEDEASYFCETWDTKIHVFGTGTKVSVL

SEQ ID NO: 985 - DNA, 363 bp, Homo sapiens
caggtgcagctggtgcagtctggggctgaggtgaagaagcctgggtcctcggtgaaggtctcctgcaaggctcctggaggtatcttcaacaccaatgctttcagctgggtccgacaggcccctggacaaggtcttgagtgggtgggaggggtcatccctttgtttcgaacagcaagctacgcacagaacgtccagggcagagtcaccattaccgcggacgaatccacgaacacagcctacatggagcttaccagcctgagatctgcggacacggccgtgtattactgtgcgagaagtagtggttaccattttaggagtcactttgactcctggggcctgggaaccctggtcaccgtctcctca

SEQ ID NO: 986 - protein, 121 aa, Homo sapiens
QVQLVQSGAEVKKPGSSVKVSCKAPGGIFNTNAFSWVRQAPGQGLEWVGGVIPLFRTASYAQNVQGRVTITADESTNTAYMELTSLRSADTAVYYCARSSGYHFRSHFDSWGLGTLVTVSS

SEQ ID NO: 987 - DNA, 363 bp, Homo sapiens
caggtgcagctggtgcaatctggggctgaggtgaagaagcctgggtcctcggtgaaggtctcctgcaaggctcctggaggtatcttcaacaccaatgctttcagctgggtccgacaggcccctggacaaggtcttgagtgggtgggaggggtcatccctttgtttcgaacagcaagctacgcacagaacgtccagggcagagtcaccattaccgcggacgaatccacgaacacagcctacatggagcttaccagcctgagatctgcggacacggccgtgtattactgtgcgagaagtagtggttaccattttaggagtcactttgactcctggggcctgggaaccctggtcaccgtctcctca

SEQ ID NO: 988 - protein, 111 aa, Homo sapiens
NFMLTQPHSVSASPGKTVTISCTGSSGNIAANYVQWYQQRPGSAPTTVIYEDDRRPSGVPDRFSGSIDRSSNSASLTISGLKTEDEADYYCQTYDTNNHAVFGGGTHLTVL

SEQ ID NO: 989 - DNA, 333 bp, Homo sapiens
aattttatgctgactcagccccactctgtgtcggcgtctccggggaagacggtgaccatctcctgcaccggcagcagtggcaacattgccgccaactatgtgcagtggtaccaacaacgtccgggcagtgcccccactactgtgatctatgaggatgaccgaagaccctctggggtccctgatcggttctctggctccatcgacaggtcctccaactctgcctccctcaccatctcaggactgaagactgaggacgaggctgactactactgtcagacttatgataccaacaatcatgctgtgttcggaggaggcacccacctgaccgtcctc

SEQ ID NO: 990 - protein, 110 aa, Homo sapiens
SYELTQPPSASGKHGQRVTISCSGGTSNIGRNHVNWYQQLPGTAPKLLIYSNEQRPSGVPDRFSGSKSGTSASLAVSGLQSEDEADYYCASWDDNLSGWVFGGGTKLTVL

SEQ ID NO: 991 - DNA, 330 bp, Homo sapiens
tcctatgagctgactcagccaccctcagcgtctgggaaacacgggcagagggtcaccatctcttgttctggaggcacctccaacatcggacgtaatcatgttaactggtaccagcaactcccaggaacggcccccaaactcctcatctatagtaatgaacagcggccctcaggggtccctgaccgattctctggctccaaatctggcacctccgcctccctggccgtgagtgggctccagtctgaggatgaggctgattattactgtgcatcatgggatgacaacttgagtggttgggtgttcggcggagggaccaagctgaccgtccta

SEQ ID NO: 992 - protein, 120 aa, Homo sapiens
QVQLVQSGAEVKKPGSSVKVSCKASGGTFSAYAFTWVRQAPGQGLEWMGGITGMFGTANYAQKFQGRVTITADELTSTAYMELSSLTSEDTALYYCARGLYYYESSLDYWGQGTLVTVSS

SEQ ID NO: 993 - DNA, 361 bp, Homo sapiens
caggtgcagctggtgcagtctggggctgaggtgaagaagcctgggtcctcggtgaaggtctcctgcaaggcttctggaggcaccttcagcgcttatgctttcacctgggtgcggcaggcccctggacaagggcttgagtggatgggaggcatcaccggaatgtttggcacagcaaactacgcacagaagttccagggcagagtcacgattaccgcggacgaactcacgagcacagcctacatggagttgagctccctgacatctgaagacacggccctttattattgtgcgagaggattgtattactatgagagtagtcttgactattggggccagggaaccctggtcaccgtctcctcag

SEQ ID NO: 994 - protein, 110 aa, Homo sapiens
QSVLTQPPSASGSPGQSVTISCTGTSSDVGGYNSVSWYQQHPGKAPKLMIYEVTKRPSGVPDRFSASKSGNTASLTVSGLQAEDEADYFCCSYAGHSAYVFGTGTKVTVL

SEQ ID NO: 995 - DNA, 361 bp, Homo sapiens
caggtgcagctggtgcagtctggggctgaggtgaagaagcctgggtcctcggtgaaggtctcctgcagggcttctggaggcaccttcagcgcttatgctttcacctgggtgcggcaggcccctggacaagggcttgagtggatgggaggcatcaccggaatgtttggcacagcaaactacgcacagaagttccagggcagagtcacgattaccgcggacgaactcacgagcacagcctacatggagttgagctccctgacatctgaagacacggccctttattattgtgcgagaggattgtattactatgagagtagtcttgactattggggccagggaaccctggtcaccgtctcctcag

SEQ ID NO: 996 - protein, 108 aa, Homo sapiens
EIVLTQSPGTLSLSPGERATLSCRASQSLSSKYLAWYQQKPGQAPRLLIYGASSRATGIPDRFSGSGSGTDFTLTISRLEPEDFAVYSCQQYDGVPRTFGQGTTVEIK

SEQ ID NO: 997 - DNA, 330 bp, Homo sapiens
cagtctgtgctgactcagccaccctccgcgtccgggtctcctggacagtcagtcaccatctcctgcactggaaccagcagtgacgttggtggttataactctgtctcctggtaccaacagcacccaggcaaagcccccaaactcatgatttatgaggtcactaagcggccctcaggggtccctgatcgcttctctgcctccaagtctggcaacacggcctccctgaccgtctctgggctccaggctgaggatgaggctgattatttctgctgctcatatgcaggccacagtgcttatgtcttcggaactgggaccaaggtcaccgtcctg

SEQ ID NO: 998 - protein, 124 aa, Homo sapiens
QVQLVQSGAEVKKPGSSVKVSCTSSEVTFSSFAISWVRQAPGQGLEWLGGISPMFGTPNYAQKFQGRVTITADQSTRTAYMDLRSLRSEDTAVYYCARSPSYICSGGTCVFDHWGQGTLVTVSS

SEQ ID NO: 999 - DNA, 324 bp, Homo sapiens
gaaattgtgctgactcagtctccaggcaccctgtctttgtctccaggggaaagagccaccctctcctgcagggccagtcagagtcttagcagcaagtacttagcctggtatcagcagaaacctggccaggctcccaggctcctcatctatggtgcatccagcagggccactggcatcccagacaggttcagtggcagtgggtctgggacagacttcaccctcaccatcagtagactggagcctgaagattttgcagtgtattcctgtcagcagtatgatggcgtacctcggacgttcggccaagggaccacggtggaaatcaaa

SEQ ID NO: 1000 - protein, 110 aa, Homo sapiens
QPGLTQPPSVSKGLRQTATLTCTGNSNNVGNQGAAWLQQHQGHPPKLLSYRNNDRPSGISERFSASRSGNTASLTITGLQPEDEADYYCSTWDSSLSAVVFGGGTKLTVL

SEQ ID NO: 1001 - DNA, 372 bp, Homo sapiens
caggtgcagctggtgcagtcaggggctgaggtgaagaagcctgggtcctcggtgaaggtctcctgcacgtcctctgaagtcaccttcagtagttttgctatcagctgggtgcgacaggcccctggacaagggcttgagtggctgggagggatcagccctatgtttggaacacctaattacgcgcagaagttccaaggcagagtcaccattaccgcggaccagtccacgaggacagcctacatggacctgaggagcctgagatctgaggacacggccgtgtattattgtgcgagatctccttcttacatttgttctggtggaacctgcgtctttgaccattggggccagggaaccctggtcaccgtctcctca

SEQ ID NO: 1002 - protein, 107 aa, Homo sapiens
DIQMTQSPSSLSASVGDRVTITCRASQSISSYLNWYQQKPGKAPKLLIYAASSLQRGVPSRFSGSGSGTDFTLTISSLQPEDFAVYYCQQYDSSPYTFGQGTKVEIK

SEQ ID NO: 1003 - DNA, 372 bp, Homo sapiens
caggtacagctgcagcagtcaggggctgaggtgaagaagcctgggtcctcggtgaaggtctcctgcacgtcctctgaagtcaccttcagtagttttgctatcagctgggtgcgacaggcccctggacaagggcttgagtggctgggagggatcagccctatgtttggaacacctaattacgcgcagaagttccaaggcagagtcaccattaccgcggaccagtccacgaggacagcctacatggacctgaggagcctgagatctgaggacacggccgtgtattattgtgcgagatctccttcttacatttgttctggtggaacctgcgtctttgaccattggggccagggaaccctggtcaccgtctcctca

SEQ ID NO: 1004 - protein, 122 aa, Homo sapiens
QVQLVQSGAEVKKPGASVKVSCKTSGVTFSSYAISWVRQAPGQGLEWMGGIIGVFGVPKYAQNFQGRVTITADKPTSTVYMELNSLRAEDTAVYYCAREPGYYVGKNGFDVWGQGTMVTVSS

SEQ ID NO: 1005 - DNA, 330 bp, Homo sapiens
cagcctgggctgactcagccaccctcggtgtccaagggcttgagacagaccgccacactcacctgcactgggaacagcaacaatgttggcaaccaaggagcagcttggctgcagcagcaccagggccaccctcccaaactcctatcctacaggaataatgaccggccctcagggatctcagagagattctctgcatccaggtcaggaaacacagcctccctgaccattactggactccagcctgaggacgaggctgactattactgctcaacatgggacagcagcctcagtgctgtggtattcggcggagggaccaagctgaccgtccta

SEQ ID NO: 1006 - protein, 110 aa, Homo sapiens
SYELTQPPSVSKGLRQTAILTCTGDSNNVGHQGTAWLQQHQGHPPKLLSYRNGNRPSGISERFSASRSGNTASLTIIGLQPEDEADYYCSVWDSSLSAWVFGGGTKLTVL

SEQ ID NO: 1007 - DNA, 321 bp, Homo sapiens
gacatccagatgacccagtctccatcctccctgtctgcatctgtaggagacagagtcaccatcacttgccgggcaagtcagagcattagcagctatttaaattggtatcagcagaaaccagggaaagcccctaagctcctgatctatgctgcatccagtttgcaaagaggggtcccatcaaggttcagtggcagtggatctgggacagacttcactctcaccattagcagcctgcagcctgaagattttgcagtgtattactgtcagcagtatgatagttcaccgtacacttttggccaggggaccaaggtagagatcaaa

SEQ ID NO: 1008 - protein, 126 aa, Homo sapiens
QVQLVQSGAEVRKPGASVKVSCKASGYTFTGYYIHWVRQAPGQGLEWMGWINPMTGGTNYAQKFQVWVTMTRDTSINTAYMEVSRLTSDDTAVYYCARGASVLRYFDWQPEALDIWGLGTTVTVSS

SEQ ID NO: 1009 - DNA, 366 bp, Homo sapiens
caggtgcagctggtgcaatctggggctgaagtgaagaagcctggggcctcagtgaaggtctcctgcaagacttctggagtcaccttcagcagctatgctatcagttgggtgcgacaggcccctggacaagggcttgagtggatgggagggatcatcggtgtctttggtgtaccaaagtacgcgcagaacttccagggcagagtcacaattaccgcggacaaaccgacgagtacagtctacatggagctgaacagcctgagagctgaggacacggccgtgtattactgtgcgagagagcccgggtactacgtaggaaagaatggttttgatgtctggggccaagggacaatggtcaccgtctcttca

SEQ ID NO: 1010 - protein, 108 aa, Homo sapiens
QPVLTQPPSVSVAPGQTASIPCGGNNIGGYSVHWYQQKPGQAPLLVIYDDKDRPSGIPERFSGANSGSTATLTISRVEAGDEGDYYCQVWDSGNDRPLFGGGTKLTVL

SEQ ID NO: 1011 - DNA, 330 bp, Homo sapiens
tcctatgagctgactcagccaccctcggtgtccaagggcttgagacagaccgccatactcacctgcactggagacagcaacaatgttggccaccaaggtacagcttggctgcaacaacaccagggccaccctcccaaactcctatcctacaggaatggcaaccggccctcagggatctcagagagattctctgcatccaggtcaggaaatacagcctccctgaccattattggactccagcctgaggacgaggctgactactactgctcagtatgggacagcagcctcagtgcctgggtgttcggcggagggaccaagctgaccgtccta

SEQ ID NO: 1012 - protein, 123 aa, Homo sapiens
QVQLVQSGAEVKKPGSSVKVSCKASGGPFSMTAFTWLRQAPGQGLEWMGGISPIFRTPKYAQKFQGRVTITADESTNTANMELTSLKSEDTAVYYCARTLSSYQPNNDAFAIWGQGTMVTVSS

SEQ ID NO: 1013 - DNA, 378 bp, Homo sapiens
caggtgcagctggtgcagtctggggctgaggtgaggaagcctggggcctcagtgaaggtctcatgtaaggcttctggatacaccttcaccggttattatattcactgggtgcgacaggcccctggacaaggacttgagtggatgggttggatcaaccctatgactggtggcacaaactatgcacagaagtttcaggtctgggtcaccatgacccgggacacgtccatcaacacagcctacatggaggtgagcaggctgacatctgacgacacggccgtgtattactgtgcgaggggggcttccgtattacgatattttgactggcagcccgaggctcttgatatctggggcctcgggaccacggtcaccgtctcctca

SEQ ID NO: 1014 - protein, 106 aa, Homo sapiens
EIVLTQSPATLSLSPGERATLSCRASQSVSSYLAWYQQKPGQAPRLLIYDASNRATGIPARFSGSGSGTDFTLTISRLEPEDFAVYFCQQYGSSPQFGQGTRLEIK

SEQ ID NO: 1015 - DNA, 324 bp, Homo sapiens
cagcctgtgctgactcagccaccctcggtgtcagtggccccaggacagacggccagcattccctgtggggggaacaacattggaggctacagtgtacactggtaccaacaaaagccgggccaggcccccctcttggtcatttatgacgataaagaccggccctcagggatccctgagcgattctctggcgccaactctgggagcacggccaccctgacaatcagcagggtcgaagccggggatgagggcgactactactgtcaggtgtgggatagtggtaatgatcgtccgctgttcggcggagggaccaagctgaccgtccta

SEQ ID NO: 1016 - protein, 123 aa, Homo sapiens; identical to SEQ ID NO: 1012

SEQ ID NO: 1017 - DNA, 369 bp, Homo sapiens
caggtgcagctggtgcagtctggggctgaagtgaagaagcctggctcctcggtgaaggtttcctgcaaggcttctggaggccccttcagcatgactgctttcacctggctgcgacaggcccctggacaagggcttgagtggatgggtgggatcagccctatctttcgtacaccgaagtacgcacagaagttccagggcagagtcacgattaccgcggacgaatccacgaacacagccaacatggagctgaccagcctgaaatctgaggacacggccgtgtattactgtgcgagaaccctttcctcctaccaaccgaataatgatgcttttgctatctggggccaagggacaatggtcaccgtctcttca

SEQ ID NO: 1018 - protein, 110 aa, Homo sapiens
LPVLTQPPSASGTPGQRVTISCSGSSSNIGSNTVNWYQQLPGTAPKLLIYSNNQRPSGVPDRFSGSRSGTSASLAIIGLRPEDEADYYCQSYDSRLSASLFGTGTTVTVL

SEQ ID NO: 1019 - DNA, 318 bp, Homo sapiens
gaaattgtgttgacgcagtctccagccaccctgtctttgtctccaggggaaagagccaccctctcctgcagggccagtcagagtgttagcagctacttagcctggtaccaacagaaacctggccaggctcccaggctcctcatctatgatgcatccaacagggccactggcatcccagccaggttcagtggcagtgggtctgggacagacttcactctcaccatcagcagactggagcctgaagattttgcagtctatttctgtcagcagtatggtagctcacctcaattcggccaagggacacgactggagattaaa

SEQ ID NO: 1020 - DNA, 369 bp, Homo sapiens; identical to SEQ ID NO: 1017

SEQ ID NO: 1021 - skipped

SEQ ID NO: 1022 - DNA, 330 bp, Homo sapiens
ctgcctgtgctgactcagccaccctcagcgtctgggacccccgggcagagggtcaccatctcttgttctggaagcagctccaacatcggaagtaatactgtaaactggtaccagcagctcccaggaacggcccccaaactcctcatctatagtaataatcagcggccctcaggggtccctgaccgattctctggctccaggtcaggcacctcagcctccctggccatcattggactccggcctgaggatgaagctgattattactgtcagtcgtatgacagcaggctcagtgcttctctcttcggaactgggaccacggtcaccgtcctc

SEQ ID NO: 1023 - protein, 5 aa, Artificial Sequence
  Description of Artificial Sequence: Synthetic Consensus Sequence
SYAFS

SEQ ID NO: 1024 - protein, 5 aa, Homo sapiens
TNAFS

SEQ ID NO: 1025 - protein, 5 aa, Homo sapiens
AYAFT

SEQ ID NO: 1026 - protein, 5 aa, Homo sapiens
SFAIS

SEQ ID NO: 1027 - protein, 5 aa, Homo sapiens
SYAIS

SEQ ID NO: 1028 - protein, 5 aa, Homo sapiens
GYYIH

SEQ ID NO: 1029 - protein, 5 aa, Homo sapiens
MTAFT

SEQ ID NO: 1030 - protein, 5 aa, Homo sapiens
DNAIS

SEQ ID NO: 1031 - protein, 17 aa, Artificial Sequence
  Description of Artificial Sequence: Synthetic Consensus Sequence
GIIPMFGTPNYAQKFQG

SEQ ID NO: 1032 - protein, 17 aa, Homo sapiens
GVIPLFRTASYAQNVQG

SEQ ID NO: 1033 - protein, 17 aa, Homo sapiens
GIIGMFGTANYAQKFQG

SEQ ID NO: 1034 - protein, 17 aa, Homo sapiens
GISPMFGTPNYAQKFQG

SEQ ID NO: 1035 - protein, 17 aa, Homo sapiens
GIIGVFGVPKYAQKFQG

SEQ ID NO: 1036 - protein, 17 aa, Homo sapiens
WINPMTGGTNYAQKFQV

SEQ ID NO: 1037 - protein, 17 aa, Homo sapiens
GISPIFRTPKYAQKFQG

SEQ ID NO: 1038 - protein, 17 aa, Homo sapiens
GIIPIFGKPNYAQKFQG

SEQ ID NO: 1039 - protein, 12 aa, Artificial Sequence
  Description of Artificial Sequence: Synthetic Consensus Sequence
SSGYYYGGGFDV

SEQ ID NO: 1040 - protein, 13 aa, Homo sapiens
SSGYHFGRSHFDS

SEQ ID NO: 1041 - protein, 11 aa, Homo sapiens
GLYYYESSLDY

SEQ ID NO: 1042 - protein, 15 aa, Homo sapiens
SPSYICSGGTCVFDH

SEQ ID NO: 1043 - protein, 13 aa, Homo sapiens
EPGYYVGKNGFDV

SEQ ID NO: 1044 - protein, 17 aa, Homo sapiens
GASVLRYFDWQPEALDI

SEQ ID NO: 1045 - protein, 14 aa, Homo sapiens
TLSSYQPNNDAFAI

SEQ ID NO: 1046 - protein, 14 aa, Homo sapiens
DSDAYYYGSGGMDV

SEQ ID NO: 1047 - protein, 12 aa, Homo sapiens
TGSSSNIGNYVA

SEQ ID NO: 1048 - protein, 13 aa, Homo sapiens
TGSSSNIAANYVQ

SEQ ID NO: 1049 - protein, 14 aa, Artificial Sequence
  Description of Artificial Sequence: Synthetic Consensus Sequence
TGTSSDVGGYNSVS

SEQ ID NO: 1050 - protein, 13 aa, Homo sapiens
TGNSNNVGNQGAA

SEQ ID NO: 1051 - protein, 13 aa, Homo sapiens
TGDSNNVGHQGTA

SEQ ID NO: 1052 - protein, 11 aa, Homo sapiens
GGNNIGGYSVH

SEQ ID NO: 1053 - protein, 11 aa, Homo sapiens
RASQSVSSYLA

SEQ ID NO: 1054 - protein, 12 aa, Homo sapiens
RASQSLSSKYLA

SEQ ID NO: 1055 - protein, 12 aa, Homo sapiens
TGSSSNIGNYVA

SEQ ID NO: 1056 - protein, 13 aa, Homo sapiens
SGSSSNIGSNTVN

SEQ ID NO: 1057 - protein, 11 aa, Homo sapiens
RASQSISSYLN

SEQ ID NO: 1058 - protein, 12 aa, Homo sapiens
TLSSGHSNYIIA

SEQ ID NO: 1059 - protein, 7 aa, Artificial Sequence
  Description of Artificial Sequence: Synthetic Consensus Sequence
SNSDRPS

SEQ ID NO: 1060 - protein, 7 aa, Homo sapiens
EDDRRPS

SEQ ID NO: 1061 - protein, 7 aa, Homo sapiens
EVTKRPS

SEQ ID NO: 1062 - protein, 7 aa, Homo sapiens
RNNDRPS

SEQ ID NO: 1063 - protein, 7 aa, Homo sapiens
RNGNRPS

SEQ ID NO: 1064 - protein, 7 aa, Homo sapiens
DDKDRPS

SEQ ID NO: 1065 - protein, 7 aa, Homo sapiens
DASNRAT

SEQ ID NO: 1066 - protein, 7 aa, Homo sapiens
GASSRAT

SEQ ID NO: 1067 - protein, 7 aa, Homo sapiens
SNNQRPS

SEQ ID NO: 1068 - protein, 7 aa, Homo sapiens
AASSLQR

SEQ ID NO: 1069 - protein, 7 aa, Homo sapiens
SNEQRPS

SEQ ID NO: 1070 - protein, 11 aa, Homo sapiens
VNSDGSHTKGD

SEQ ID NO: 1071 - protein, 10 aa, Artificial Sequence
  Description of Artificial Sequence: Synthetic Consensus Sequence
QSYDSLSAYV

SEQ ID NO: 1072 - protein, 10 aa, Homo sapiens
QSYDTNNHAV

SEQ ID NO: 1073 - protein, 10 aa, Homo sapiens
CSYAGHSAYV

SEQ ID NO: 1074 - protein, 11 aa, Homo sapiens
STWDSSLSAVV

SEQ ID NO: 1075 - protein, 11 aa, Homo sapiens
SVWDSSLSAWV

SEQ ID NO: 1076 - protein, 11 aa, Homo sapiens
QVWDSGNDRPL

SEQ ID NO: 1077 - protein, 9 aa, Homo sapiens
QQYGSSPQV

SEQ ID NO: 1078 - protein, 9 aa, Homo sapiens
QQYDGVPRT

SEQ ID NO: 1079 - protein, 11 aa, Homo sapiens
QSYDSRLSASL

SEQ ID NO: 1080 - protein, 9 aa, Homo sapiens
QQYDSSPYT

SEQ ID NO: 1081 - protein, 11 aa, Homo sapiens
ASWDDNLSGWV

SEQ ID NO: 1082 - protein, 9 aa, Homo sapiens
ETWDTKIHV

SEQ ID NO: 1083 - protein, 10 aa, Artificial Sequence
  Description of Artificial Sequence: Synthetic peptide
GTETSQVAPA

SEQ ID NO: 1084 - protein, 6 aa, Artificial Sequence
  Description of Artificial Sequence: Synthetic 6xHis tag
HHHHHH

SEQ ID NO: 1085 - protein, 4 aa, Influenza A virus
INGW

SEQ ID NO: 1086 - protein, 4 aa, Influenza A virus
IDGW

SEQ ID NO: 1087 - protein, 4 aa, Influenza A virus
VAGW

SEQ ID NO: 1088 - protein, 4 aa, Influenza A virus
VDGW

SEQ ID NO: 1089 - protein, 4 aa, Influenza A virus
IAGW

SEQ ID NO: 1090 - protein, 87 aa, Homo sapiens
KKPGSSVKVSCKASGGTFSSYAISWVRQAPGQGLEWMGGIIPMFGTPNYAQKFQGRVTITADESTSTAYMELSSLRSEDTAVYYCAR

SEQ ID NO: 1091 - protein, 87 aa, Homo sapiens
KKPGSSVKVSCKASGGTFSSYAISWVRQAPGQGLEWMGGIIPIFGTPNYAQKFQGRVTITADESTSTAYMELSSLRSEDTAVYYCAR

SEQ ID NO: 1092 - protein, 108 aa, Homo sapiens
KKPGSSVKVSCTSSEVTFSSFAISWVRQAPGQGLEWLGGISPMFGTPNYAQKFQGRVTITADQSTRTAYMDLRSLRSEDTAVYYCARSPSYICSGGTCVFDHWGQGTL

SEQ ID NO: 1093 - protein, 104 aa, Homo sapiens
KKPGSSVKVSCKASGGTFSAYAFTWVRQAPGQGLEWMGGIIGMFGTANYAQKFQGRVTITADELTSTAYMELSSLTSEDTALYYCARGLYYYESSFDYWGQGTL

SEQ ID NO: 1094 - protein, 107 aa, Homo sapiens
KKPGSSVKVSCKASGGPFSMTAFTWLRQAPGQGLEWMGGISPIFRTPKYAQKFQGRVTITADESTNTANMELTSLKSEDTAVYYCARTLSSYQPNNDAFAIWGQGTM

SEQ ID NO: 1095 - protein, 106 aa, Homo sapiens
KKPGASVKVSCKTSGVTFSSYAISWVRQAPGQGLEWMGGIIGVFGVPKYAQKFQGRVTITADKPTSTVYMELNSLRAEDTAVYYCAREPGYYVGKNGFDVWGQGTM

SEQ ID NO: 1096 - protein, 105 aa, Homo sapiens
KKPGSSVKVSCKAPGGIFNTNAFSWVRQAPGQGLEWVGGVIPLFRTASYAQNVQGRVTITADESTNTAYMELTSLRSADTAVYYCARSSGYHFRSHFDSWGLGTL

SEQ ID NO: 1097 - protein, 110 aa, Homo sapiens
RKPGASVKVSCKASGYTFTGYYIHWVRQAPGQGLEWMGWINPMTGGTNYAQKFQVWVTMTRDTSINTAYMEVTRLTSDDTAVYYCARGASVLRYFDWQPEALDIWGLGTT

SEQ ID NO: 1098 - protein, 8 aa, Homo sapiens
GGTFSSYA

SEQ ID NO: 1099 - protein, 8 aa, Homo sapiens
GGTFSSYA

SEQ ID NO: 1100 - protein, 8 aa, Homo sapiens
EVTFSSFA

SEQ ID NO: 1101 - protein, 8 aa, Homo sapiens
GGTFSAYA

SEQ ID NO: 1102 - protein, 8 aa, Homo sapiens
GGPFSMTA

SEQ ID NO: 1103 - protein, 8 aa, Homo sapiens
GVTFSSYA

SEQ ID NO: 1104 - protein, 8 aa, Homo sapiens
GGIFNTNA

SEQ ID NO: 1105 - protein, 8 aa, Homo sapiens
GYTFTGYY

SEQ ID NO: 1106 - protein, 8 aa, Homo sapiens
IIPMFGTP

SEQ ID NO: 1107 - protein, 8 aa, Homo sapiens
IIPIFGTP

SEQ ID NO: 1108 - protein, 8 aa, Homo sapiens
ISPMFGTP

SEQ ID NO: 1109 - protein, 8 aa, Homo sapiens
IIGMFGTA

SEQ ID NO: 1110 - protein, 8 aa, Homo sapiens
ISPIFRTP

SEQ ID NO: 1111 - protein, 8 aa, Homo sapiens
IIGVFGVP

SEQ ID NO: 1112 - protein, 8 aa, Homo sapiens
VIPLFRTA

SEQ ID NO: 1113 - protein, 8 aa, Homo sapiens
INPMTGGT

SEQ ID NO: 1114 - protein, 17 aa, Homo sapiens
ARSPSYICSGGTCVFDH

SEQ ID NO: 1115 - protein, 13 aa, Homo sapiens
ARGLYYYESSFDY

SEQ ID NO: 1116 - protein, 16 aa, Homo sapiens
ARTLSSYQPNNDAFAI

SEQ ID NO: 1117 - protein, 15 aa, Homo sapiens
AREPGYYVGKNGFDV

SEQ ID NO: 1118 - protein, 14 aa, Homo sapiens
ARSSGYHFRSHFDS

SEQ ID NO: 1119 - protein, 19 aa, Homo sapiens
ARGASVLRYFDWQPEALDI

SEQ ID NO: 1120 - protein, 8 aa, Homo sapiens
SGNIAANY

SEQ ID NO: 1121 - protein, 9 aa, Homo sapiens
SSDVGGYNS

SEQ ID NO: 1122 - protein, 8 aa, Homo sapiens
SNNVGNQG

SEQ ID NO: 1123 - protein, 8 aa, Homo sapiens
SNNVGHQG

SEQ ID NO: 1124 - protein, 6 aa, Homo sapiens
NIGGYS

SEQ ID NO: 1125 - protein, 7 aa, Homo sapiens
QSSVSSY

SEQ ID NO: 1126 - protein, 7 aa, Homo sapiens
QSLSSKY

SEQ ID NO: 1127 - protein, 8 aa, Homo sapiens
SSNIGSNT

SEQ ID NO: 1128 - protein, 6 aa, Homo sapiens
QSISSY

SEQ ID NO: 1129 - protein, 8 aa, Homo sapiens
TSNIGRNH

SEQ ID NO: 1130 - protein, 3 aa, Homo sapiens
EDD

SEQ ID NO: 1131 - protein, 3 aa, Homo sapiens
EVT

SEQ ID NO: 1132 - protein, 3 aa, Homo sapiens
RNN

SEQ ID NO: 1133 - protein, 3 aa, Homo sapiens
RNG

SEQ ID NO: 1134 - protein, 3 aa, Homo sapiens
DDK

SEQ ID NO: 1135 - protein, 3 aa, Homo sapiens
DAS

SEQ ID NO: 1136 - protein, 3 aa, Homo sapiens
GAS

SEQ ID NO: 1137 - protein, 3 aa, Homo sapiens
SNN

SEQ ID NO: 1138 - protein, 3 aa, Homo sapiens
AAS

SEQ ID NO: 1139 - protein, 3 aa, Homo sapiens
SNE

SEQ ID NO: 1140 - protein, 10 aa, Homo sapiens
QTYDTNNHAV

SEQ ID NO: 1141 - protein, 10 aa, Homo sapiens
CSYAGHSAYV

SEQ ID NO: 1142 - protein, 11 aa, Homo sapiens
STWDSSLSAVV

SEQ ID NO: 1143 - protein, 11 aa, Homo sapiens
SVWDSSLSAWV

SEQ ID NO: 1144 - protein, 11 aa, Homo sapiens
QVWDSGNDRPL

SEQ ID NO: 1145 - protein, 8 aa, Homo sapiens
QQYGSSPQ

SEQ ID NO: 1146 - protein, 9 aa, Homo sapiens
QQYDGVPRT

SEQ ID NO: 1147 - protein, 11 aa, Homo sapiens
QSYDSRLSASL

SEQ ID NO: 1148 - protein, 9 aa, Homo sapiens
QQYDSSPYT

SEQ ID NO: 1149 - protein, 11 aa, Homo sapiens
ASWDDNLSGWV

SEQ ID NO: 1150 - protein, 2 aa, Homo sapiens
AR

SEQ ID NO: 1151 - protein, 10 aa, Homo sapiens
QVQLVQGAEV

SEQ ID NO: 1152 - protein, 5 aa, Homo sapiens
VTVSS

SEQ ID NO: 1153 - DNA, 354 bp, Homo sapiens
caggtccagctcgtccagtccggcgctgaagtggtgaaacccggggcatccgtcaaagtctcttgtaaggctagtggctacaccttcacatcctactggatgcattgggtgaaacaggcacctggccagggactcgaatggatcggagccgtgtctcctggaaattccgacacctcctacaacgaaaaattcaagggcaaggcaaccctcactgtggatactagtgcttctaccgcctacatggaactctcatctctccgctctgaggacactgccgtctactactgtactcggtcacgatacgggaacaacgctctcgattactggggacagggcacactggtcactgtctct

SEQ ID NO: 1154 - protein, 118 aa, Homo sapiens
QVQLVQSGAEVVKPGASVKVSCKASGYTFTSYWMHWVKQAPGQGLEWIGAVSPGNSDTSYNEKFKGKATLTVDTSASTAYMELSSLRSEDTAVYYCTRSRYGNNALDYWGQGTLVTVS

SEQ ID NO: 1155 - DNA, 321 bp, Homo sapiens
gatattcagctcacacagagcccatcttctctgtctgcttctgtgggcgatcgagtgacaatcacttgtcgggctagtcagggcatttctagcaacattgtgtggctccagcagaaacctggcaaagccccaaaaggcctcatctaccacggaaccaacctggaatctggcgtgccatctcggtttagtggatctggatccgggaccgattacacactcaccatctcttcactggaacctgaggatttcgccacctactactgtgtccagtactcccagtttccacccacttttggacagggaaccaaactcgagatcaaa

SEQ ID NO: 1156 - protein, 107 aa, Homo sapiens
DIQLTQSPSSLSASVGDRVTITCRASQGISSNIVWLQQKPGKAPKGLIYHGTNLESGVPSRFSGSGSGTDYTLTISSLEPEDFATYYCVQYSQFPPTFGQGTKLEIK

SEQ ID NO: 1157 - protein, 8 aa, Homo sapiens
GYTFTSYW

SEQ ID NO: 1158 - protein, 8 aa, Homo sapiens
VSPGNSDT

SEQ ID NO: 1159 - protein, 12 aa, Homo sapiens
TRSRYGNNALDY

SEQ ID NO: 1160 - protein, 9 aa, Homo sapiens
QGISSNIVW

SEQ ID NO: 1161 - protein, 3 aa, Homo sapiens
HGT

SEQ ID NO: 1162 - protein, 9 aa, Homo sapiens
VQYSQFPPT

SEQ ID NO: 1163 - DNA, 354 bp, Homo sapiens
caggtccagctcgtccagtccggcgctgaagtggtgaaacccggggcatccgtcaaagtctcttgtaaggctagtggctacaccttcacatcctactggatgcattgggtgaaacaggcacctggccagggactcgaatggatcggagccgtgtctcctggaaattccgacacctcctacaacgaaaaattcaagggcaaggcaaccctcactgtggacaaatctgcctctaccgcctacatggaactctcatctctccgctctgaggatactgctgtgtactactgtacccggtcacgatacggcaataacgccctcgattactgggggcagggaactctggtcactgtgtct

SEQ ID NO: 1164 - protein, 118 aa, Homo sapiens
QVQLVQSGAEVVKPGASVKVSCKASGYTFTSYWMHWVKQAPGQGLEWIGAVSPGNSDTSYNEKFKGKATLTVDKSASTAYMELSSLRSEDTAVYYCTRSRYGNNALDYWGQGTLVTVS

SEQ ID NO: 1165 - DNA, 357 bp, Mus musculus
caggtccagctgcagcagtctgggactgtgctcgcaaggcctggggcttcagtgaagatgtcctgcaaggcttctggctacacctttaccagttactggatgcactgggtaaaacagaggcctggacagggtctggaatggattggcgctgtttctcctggaaatagtgatactagctacaaccagaagttcaagggcaaggccacactgactgcagtcacatccaccagcactgcctacatggagttcagcagcctgacaaatgaggactctgcggtctattactgtacaagaagtcgatatggtaacaatgctttggactactggggccaagggaccacggtcaccgtctcctca

SEQ ID NO: 1166 - protein, 119 aa, Mus musculus
QVQLQQSGTVLARPGASVKMSCKASGYTFTSYWMHWVKQRPGQGLEWIGAVSPGNSDTSYNQKFKGKATLTAVTSTSTAYMEFSSLTNEDSAVYYCTRSRYGNNALDYWGQGTTVTVSS

SEQ ID NO: 1167 - DNA, 330 bp, Mus musculus
gacatcgagctcacccagtctcctgcttccttagctgtatctctggggcagagggccaccatctcatacagggccagcaaaagtgtcagtacatctggctatagttatatgcactggaaccaacagaaaccaggacagccacccagactcctcatctatcttgtatccaacctagaatctggggtccctgccaggttcagtggcagtgggtctgggacagacttcaccctcaacatccatcctgtggaggaggaggatgctgcaacctattactgtcagcacattaagggagcttacacgttcggaggggggaccaagctggaaataaaa

SEQ ID NO: 1168 - DNA, 330 bp, Mus musculus
gacatcgagctcactcagtctccagcttctttggctgtgtctctagggcagagggccaccatctcctgcagagccagcgcaagtgttgataattatggcattagttttatgaactggttccaacagaaaccaggacagccacccaaactcctcatctatgctgcatccaaccaaggatccggggtccctgccaggtttagtggcagtgggtctgggacagacttcagcctcaacatccatcctatggaggaggatgatactgcaacctattactgtcagcacattaagggagcttacacgttcggaggggggaccaagctggagctgaaa

SEQ ID NO: 1169 - DNA, 321 bp, Mus musculus
gacatcgagctcactcagtctccatcctccatgtctgtatctctgggagacacagtcaacatcacttgccgtgcaagtcagggcattagcagtaatatagtgtggttgcagcagaaaccagggaagtcatttaagggcctgatctatcatgggaccaatttggaagatggagttccatcaaggttcagtggcagtggatctggagccgattattctctcaccatcagcagcctggaatctgaggattttgcagactattactgtgtacagtattctcagtttcctcccacgttcggctcggggaccaagctggagctgaaa

SEQ ID NO: 1170 - protein, 107 aa, Mus musculus
DIELTQSPSSMSVSLGDTVNITCRASQGISSNIVWLQQKPGKSFKGLIYHGTNLEDGVPSRFSGSGSGADYSLTISSLESEDFADYYCVQYSQFPPTFGSGTKLELK

SEQ ID NO: 1171 - protein, 118 aa, Homo sapiens; identical to SEQ ID NO: 1164

SEQ ID NO: 1172 - protein, 118 aa, Mus musculus
QVQLQQSGTVLARPGASVKMSCKASGYTFTSYWMHWVKQRPGQGLEWIGAVSPGNSDTSYNQKFKGKATLTAVTSTSTAYMEFSSLTNEDSAVYYCTRSRYGNNALDYWGQGTTVTVS

SEQ ID NO: 1173 - protein, 107 aa, Homo sapiens
DIQMTQSPSSLSASVGDRVTITCRASQGISSNIVWYQQKPGKAPKGLIYHGTNLESGVPSRFSGSGSGTDYTLTISSLQPEDFATYYCVQYSQFPPTFGQGTKLEIK

SEQ ID NO: 1174 - protein, 98 aa, Homo sapiens
QVQLVQSGAEVKKPGSSVKVSCKASGGTFSSYAISWVRQAPGQGLEWMGGIIPIFGTANYAQKFQGRVTITADESTSTAYMELSSLRSEDTAVYYCAR

SEQ ID NO: 1175 - DNA, 294 bp, Homo sapiens
caggtgcagctggtgcagtctggggctgaggtgaagaagcctgggtcctcggtgaaggtctcctgcaaggcttctggaggcaccttcagcagctatgctatcagctgggtgcgacaggcccctggacaagggcttgagtggatgggagggatcatccctatctttggtacagcaaactacgcacagaagttccagggcagagtcacgattaccgcggacgaatccacgagcacagcctacatggagctgagcagcctgagatctgaggacacggccgtgtattactgtgcgaga

SEQ ID NO: 1176 - protein, 8 aa, Artificial Sequence
  Description of Artificial Sequence: Synthetic peptide
ISPMFGTP

SEQ ID NO: 1177 - protein, 8 aa, Artificial Sequence
  Description of Artificial Sequence: Synthetic peptide
IIPIFGTA

SEQ ID NO: 1178 - protein, 8 aa, Artificial Sequence
  Description of Artificial Sequence: Synthetic peptide
ISPIFGTA

SEQ ID NO: 1179 - protein, 8 aa, Artificial Sequence
  Description of Artificial Sequence: Synthetic peptide
  MOD_RES (2)..(2): Ile or Ser
  MOD_RES (4)..(4): Ile or Met
IXPXFGTA

SEQ ID NO: 1180 - protein, 8 aa, Artificial Sequence
  Description of Artificial Sequence: Synthetic peptide
  MOD_RES (1)..(1): Gly or Glu
  MOD_RES (2)..(2): Gly or Val
XXTFSSYA

SEQ ID NO: 1181 - protein, 8 aa, Artificial Sequence
  Description of Artificial Sequence: Synthetic peptide
  MOD_RES (2)..(2): Ile or Ser
  MOD_RES (4)..(4): Ile or Met
IXPXFGTA

SEQ ID NO: 1182 - DNA, 354 bp, Artificial Sequence
  Description of Artificial Sequence: Synthetic Variable heavy chain
caggtgcagctggtgcagagcggagccgaggtgaagaagcctggagcttccgtcaaggtgtcctgcaaggccagcggctacaccttcgccagccaatggatgcactggatgcggcaggcacctggacagggcctcgaatggatcggctggatcaaccccggcaacgtgaacaccaagtacaacgagaagttcaagggcagggccaccctgaccgtggacaccagcaccaacaccgcctacatggaactgagcagcctgcggagcgaggacaccgccgtgtactactgcgccagaagcacctggtaccggccgctggactactggggccagggcaccctggtgaccgtgagcagc

SEQ ID NO: 1183 - protein, 118 aa, Artificial Sequence
  Description of Artificial Sequence: Synthetic Variable heavy chain
QVQLVQSGAEVKKPGASVKVSCKASGYTFASQWMHWMRQAPGQGLEWIGWINPGNVNTKYNEKFKGRATLTVDTSTNTAYMELSSLRSEDTAVYYCARSTWYRPLDYWGQGTLVTVSS

SEQ ID NO: 1184 - DNA, 336 bp, Artificial Sequence
  Description of Artificial Sequence: Synthetic Variable light chain
gacatcgtgatgacccagagccccgacagcctggccgtgagcctgggcgagcgggccaccatcaactgcaagagcagccagagcatcctgtacagcagcaaccagaagaactacctggcctggtatcagcagaagcccggccagagccccaagctgctgatctactgggccagcacccgggagagcggcgtgcccgaccggtttagcggcagcggctccggcaccgacttcaccctgaccatcagcagcctgcaggccgaggacgtggccgtgtactactgccaccagtacatcagcagctacaccttcggccagggcacaaagctggaaatcaag

SEQ ID NO: 1185 - protein, 112 aa, Artificial Sequence
  Description of Artificial Sequence: Synthetic Variable light chain
DIVMTQSPDSLAVSLGERATINCKSSQSILYSSNQKNYLAWYQQKPGQSPKLLIYWASTRESGVPDRFSGSGSGTDFTLTISSLQAEDVAVYYCHQYISSYTFGQGTKLEIK

SEQ ID NO: 1186 - DNA, 354 bp, Artificial Sequence
  Description of Artificial Sequence: Synthetic Variable heavy chain
caggtgcagctggtgcagagcggagccgaggtgaagaagcctggagcttccgtcaaggtgtcctgcaaggccagcggctacaccttcgccagcagctggatgcactggatgcggcaggcacctggacagggcctcgaatggatcggctggatcaaccccggcaacgtgaacaccaagtacaacgagaagttcaagggcagggccaccctgaccgtggacaccagcaccaacaccgcctacatggaactgagcagcctgcggagcgaggacaccgccgtgtactactgcgccagaagcacgtggtatcggccgaatgactactggggccagggcaccctggtgaccgtgagcagc

SEQ ID NO: 1187 - protein, 118 aa, Artificial Sequence
  Description of Artificial Sequence: Synthetic Variable heavy chain
QVQLVQSGAEVKKPGASVKVSCKASGYTFASSWMHWMRQAPGQGLEWIGWINPGNVNTKYNEKFKGRATLTVDTSTNTAYMELSSLRSEDTAVYYCARSTWYRPNDYWGQGTLVTVSS

SEQ ID NO: 1188 - DNA, 336 bp, Artificial Sequence
  Description of Artificial Sequence: Synthetic Variable light chain
gacatcgtgatgacccagagccccgacagcctggccgtgagcctgggcgagcgggccaccatcaactgcaagagcagccagagcatcctgtacagcagcaaccagaagaactacctggcctggtatcagcagaagcccggccagagccccaagctgctgatctactgggccagcacccgggagagcggcgtgcccgaccggtttagcggcagcggctccggcaccgacttcaccctgaccatcagcagcctgcaggccgaggacgtggccgtgtactactgccaccagtacaaaagcagctacaccttcggccagggcacaaagctggaaatcaag

SEQ ID NO: 1189 - protein, 112 aa, Artificial Sequence
  Description of Artificial Sequence: Synthetic Variable light chain
DIVMTQSPDSLAVSLGERATINCKSSQSILYSSNQKNYLAWYQQKPGQSPKLLIYWASTRESGVPDRFSGSGSGTDFTLTISSLQAEDVAVYYCHQYKSSYTFGQGTKLEIK

SEQ ID NO: 1190 - DNA, 354 bp, Artificial Sequence
  Description of Artificial Sequence: Synthetic Variable heavy chain
caggtgcagctggtgcagagcggagccgaggtgaagaagcctggagcttccgtcaaggtgtcctgcaaggccagcggctacaccttcgccagcagctggatgcactggatgcggcaggcacctggacagggcctcgaatggatcggctggatcaaccccggcaacgtgaacaccaagtacaacgagaagttcaagggcagggccaccctgaccgtggacaccagcaccaacaccgcctacatggaactgagcagcctgcggagcgaggacaccgccgtgtactactgcgccagaaccacccgttatcggcccctggactactggggccagggcaccctggtgaccgtgagcagc

SEQ ID NO: 1191 - protein, 118 aa, Artificial Sequence
  Description of Artificial Sequence: Synthetic Variable heavy chain
QVQLVQSGAEVKKPGASVKVSCKASGYTFASSWMHWMRQAPGQGLEWIGWINPGNVNTKYNEKFKGRATLTVDTSTNTAYMELSSLRSEDTAVYYCARTTRYRPLDYWGQGTLVTVSS

SEQ ID NO: 1192 - DNA, 336 bp, Artificial Sequence
  Description of Artificial Sequence: Synthetic Variable light chain
gacatcgtgatgacccagagccccgacagcctggccgtgagcctgggcgagcgggccaccatcaactgcaagagcagccagagcatcctgtacagcagcaaccagaagaactacctggcctggtatcagcagaagcccggccagagccccaagctgctgatctactgggccagcacccgggagagcggcgtgcccgaccggtttagcggcagcggctccggcaccgacttcaccctgaccatcagcagcctgcaggccgaggacgtggccgtgtactactgccaccagtaccgtagcagctacaccttcggccagggcacaaagctggaaatcaag

SEQ ID NO: 1193 - protein, 112 aa, Artificial Sequence
  Description of Artificial Sequence: Synthetic Variable light chain
DIVMTQSPDSLAVSLGERATINCKSSQSILYSSNQKNYLAWYQQKPGQSPKLLIYWASTRESGVPDRFSGSGSGTDFTLTISSLQAEDVAVYYCHQYRSSYTFGQGTKLEIK

SEQ ID NO: 1194 - DNA, 354 bp, Artificial Sequence
  Description of Artificial Sequence: Synthetic Variable heavy chain
caggtgcagctggtgcagagcggagccgaggtgaagaagcctggagcttccgtcaaggtgtcctgcaaggccagcggctacaccttcgccagccaatatatgcactggatgcggcaggcacctggacagggcctcgaatggatcggctggatcaaccccggcaacgtgaacaccaagtacaacgagaagttcaagggcagggccaccctgaccgtggacaccagcaccaacaccgcctacatggaactgagcagcctgcggagcgaggacaccgccgtgtactactgcgccagactgacctattatcggccgccggactactggggccagggcaccctggtgaccgtgagcagc

SEQ ID NO: 1195 - protein, 118 aa, Artificial Sequence
  Description of Artificial Sequence: Synthetic Variable heavy chain
QVQLVQSGAEVKKPGASVKVSCKASGYTFASQYMHWMRQAPGQGLEWIGWINPGNVNTKYNEKFKGRATLTVDTSTNTAYMELSSLRSEDTAVYYCARLTYYRPPDYWGQGTLVTVSS

SEQ ID NO: 1196 - DNA, 336 bp, Artificial Sequence
  Description of Artificial Sequence: Synthetic Variable light chain
gacatcgtgatgacccagagccccgacagcctggccgtgagcctgggcgagcgggccaccatcaactgcaagagcagccagagcatcctgtacagcagcaaccagaagaactacctggcctggtatcagcagaagcccggccagagccccaagctgctgatctactgggccagcacccgggagagcggcgtgcccgaccggtttagcggcagcggctccggcaccgacttcaccctgaccatcagcagcctgcaggccgaggacgtggccgtgtactactgccaccagtactatagcagctacaccttcggccagggcacaaagctggaaatcaag

SEQ ID NO: 1197 - protein, 112 aa, Artificial Sequence
  Description of Artificial Sequence: Synthetic Variable light chain
DIVMTQSPDSLAVSLGERATINCKSSQSILYSSNQKNYLAWYQQKPGQSPKLLIYWASTRESGVPDRFSGSGSGTDFTLTISSLQAEDVAVYYCHQYYSSYTFGQGTKLEIK

SEQ ID NO: 1198 - DNA, 354 bp, Artificial Sequence
  Description of Artificial Sequence: Synthetic Variable heavy chain
caggtgcagctggtgcagagcggagccgaggtgaagaagcctggagcttccgtcaaggtgtcctgcaaggccagcggctacaccttcgccagcgcgtggatgcactggatgcggcaggcacctggacagggcctcgaatggatcggctggatcaaccccggcaacgtgaacaccaagtacaacgagaagttcaagggcagggccaccctgaccgtggacaccagcaccaacaccgcctacatggaactgagcagcctgcggagcgaggacaccgccgtgtactactgcgccagaagcacgtattaccggccgctggactactggggccagggcaccctggtgaccgtgagcagc

SEQ ID NO: 1199 - protein, 118 aa, Artificial Sequence
  Description of Artificial Sequence: Synthetic Variable heavy chain
QVQLVQSGAEVKKPGASVKVSCKASGYTFASAWMHWMRQAPGQGLEWIGWINPGNVNTKYNEKFKGRATLTVDTSTNTAYMELSSLRSEDTAVYYCARSTYYRPLDYWGQGTLVTVSS

SEQ ID NO: 1200 - DNA, 336 bp, Artificial Sequence
  Description of Artificial Sequence: Synthetic Variable light chain
gacatcgtgatgacccagagccccgacagcctggccgtgagcctgggcgagcgggccaccatcaactgcaagagcagccagagcatcctgtacagcagcaaccagaagaactacctggcctggtatcagcagaagcccggccagagccccaagctgctgatctactgggccagcacccgggagagcggcgtgcccgaccggtttagcggcagcggctccggcaccgacttcaccctgaccatcagcagcctgcaggccgaggacgtggccgtgtactactgccaccagtacatgagcagctacaccttcggccagggcacaaagctggaaatcaag

SEQ ID NO: 1201 - protein, 112 aa, Artificial Sequence
  Description of Artificial Sequence: Synthetic Variable light chain
DIVMTQSPDSLAVSLGERATINCKSSQSILYSSNQKNYLAWYQQKPGQSPKLLIYWASTRESGVPDRFSGSGSGTDFTLTISSLQAEDVAVYYCHQYMSSYTFGQGTKLEIK

SEQ ID NO: 1202 - protein, 8 aa, Artificial Sequence
  Description of Artificial Sequence: Synthetic variable heavy chain, CDR1
GYTFASYY

SEQ ID NO: 1203 - protein, 8 aa, Artificial Sequence
  Description of Artificial Sequence: Synthetic variable heavy chain, CDR1
GYTFASQW

SEQ ID NO: 1204 - protein, 8 aa, Artificial Sequence
  Description of Artificial Sequence: Synthetic variable heavy chain, CDR1
GYTFASSW

SEQ ID NO: 1205 - protein, 8 aa, Artificial Sequence
  Description of Artificial Sequence: Synthetic variable heavy chain, CDR1
GYTFASQY

SEQ ID NO: 1206 - protein, 8 aa, Artificial Sequence
  Description of Artificial Sequence: Synthetic variable heavy chain, CDR1
GYTFASAW

SEQ ID NO: 1207 - protein, 12 aa, Artificial Sequence
  Description of Artificial Sequence: Synthetic variable light chain, CDR1
QSILYSSNQKNY

SEQ ID NO: 1208 - protein, 8 aa, Artificial Sequence
  Description of Artificial Sequence: Synthetic variable heavy chain, CDR2
INPGNVNT

SEQ ID NO: 1209 - protein, 6 aa, Artificial Sequence
  Description of Artificial Sequence: Synthetic variable light chain, CDR2
WASTRE

SEQ ID NO: 1210 - protein, 9 aa, Artificial Sequence
  Description of Artificial Sequence: Synthetic variable heavy chain, CDR3
STYYRPLDY

SEQ ID NO: 1211 - protein, 9 aa, Artificial Sequence
  Description of Artificial Sequence: Synthetic variable heavy chain, CDR3
STWYRPLDY

SEQ ID NO: 1212 - protein, 9 aa, Artificial Sequence
  Description of Artificial Sequence: Synthetic variable heavy chain, CDR3
STWYRPNDY

SEQ ID NO: 1213 - protein, 9 aa, Artificial Sequence
  Description of Artificial Sequence: Synthetic variable heavy chain, CDR3
TTRYRPLDY

SEQ ID NO: 1214 - protein, 9 aa, Artificial Sequence
  Description of Artificial Sequence: Synthetic variable heavy chain, CDR3
LTYYRPPDY

SEQ ID NO: 1215 - protein, 8 aa, Artificial Sequence
  Description of Artificial Sequence: Synthetic variable light chain, CDR3
HQYLSSYT

SEQ ID NO: 1216 - protein, 8 aa, Artificial Sequence
  Description of Artificial Sequence: Synthetic variable light chain, CDR3
HQYISSYT

SEQ ID NO: 1217 - protein, 8 aa, Artificial Sequence
  Description of Artificial Sequence: Synthetic variable light chain, CDR3
HQYKSSYT

SEQ ID NO: 1218 - protein, 8 aa, Artificial Sequence
  Description of Artificial Sequence: Synthetic variable light chain, CDR3
HQYRSSYT

SEQ ID NO: 1219 - protein, 8 aa, Artificial Sequence
  Description of Artificial Sequence: Synthetic variable light chain, CDR3
HQYYSSYT

SEQ ID NO: 1220 - protein, 8 aa, Artificial Sequence
  Description of Artificial Sequence: Synthetic variable light chain, CDR3
HQYMSSYT

SEQ ID NO: 1221 - DNA, 27 bp, Artificial Sequence
  Description of Artificial Sequence: Synthetic Chemically synthesized primer
tctgagtaggtgtcattctattctggg

SEQ ID NO: 1222 - DNA, 25 bp, Artificial Sequence
  Description of Artificial Sequence: Synthetic Chemically synthesized primer
cactaggggttcctagatctctccc

SEQ ID NO: 1223 - DNA, 26 bp, Artificial Sequence
  Description of Artificial Sequence: Synthetic Chemically synthesized probe
tcttcccaatcctcccccttgctgtc

SEQ ID NO: 1224 - protein, 123 aa, Artificial Sequence
  Description of Artificial Sequence: Synthetic polypeptide
TRVLSQVQLVQSGAEVKKPGASVKVSCKASGYTFSGYSTHWLRQVPGQGLEWIGWDNPSSGDTTYAENFRGRVTLTRDTSITTDYLEVRGLRSDDTAVYYCARGGDDYSFDHWGQGTLVTVSS

SEQ ID NO: 1225 - DNA, 354 bp, Artificial Sequence
  Description of Artificial Sequence: Synthetic polynucleotide
  modified_base (62)..(62): a, c, t, or g
  modified_base (90)..(90): a, c, t, or g
  modified_base (120)..(120): a, c, t, or g
  modified_base (182)..(182): a, c, t, or g
  modified_base (190)..(192): a, c, t, or g
  modified_base (208)..(208): a, c, t, or g
  modified_base (256)..(256): a, c, t, or g
  modified_base (279)..(279): a, c, t, or g
  modified_base (288)..(288): a, c, t, or g
  modified_base (297)..(297): a, c, t, or g
caggtgcagctggtgcagtctggggctgaggtgaagaagcctggggcctcagtgaaagtctnctgcaaggcttctggatacaccttcagnggctactctacacactggctgcgacaggtncctggacagggacttgagtggattggatgggacaaccctagtagtggtgacacgacctatgnagagaatnnncggggcagggtcaccntgaccagggacacgtccatcaccacagattacttggaagtgaggggtntaagatctgacgacacggccgtntattattgngccagaggnggagatgactacagctttgaccattggggtcagggcaccctggtcaccgtctcctca

SEQ ID NO: 1226 - protein, 105 aa, Artificial Sequence
  Description of Artificial Sequence: Synthetic polypeptide
SSELTQDPAVSVALGQTVRITCRGDSLRSYYASWYQQKPGQAPVLVIYGENNRPSGIPDRFSGSSSGDTASLTITGAQAEDEADYYCNSRDSSDHLLLFGQGTKL

SEQ ID NO: 1227 - DNA, 327 bp, Artificial Sequence
  Description of Artificial Sequence: Synthetic polynucleotide
tcttctgagctgactcaggacccagctgtgtctgtggccttgggacagacagtcaggatcacatgccgaggagacagcctcagaagttattatgcaagctggtaccaacagaagccaggacaggcccctgtacttgtcatctatggtgaaaacaaccgaccctcagggatcccagaccgattctctggctccagctcaggagacacagcttccttgaccatcactggggctcaggcggaagatgaggctgactattactgtaactcccgggacagcagtgatcaccttctcctattcggtggagggaccaagttgaccgtcctaggt

SEQ ID NO: 1228 - protein, 330 aa, Homo sapiens
ASTKGPSVFPLAPSSKSTSGGTAALGCLVKDYFPEPVTVSWNSGALTSGVHTFPAVLQSSGLYSLSSVVTVPSSSLGTQTYICNVNHKPSNTKVDKKAEPKSCDKTHTCPPCPAPELLGGPSVFLFPPKPKDTLMISRTPEVTCVVVDVSHEDPEVKFNWYVDGVEVHNAKTKPREEQYNSTYRVVSVLTVLHQDWLNGKEYKCKVSNKALPAPIEKTISKAKGQPREPQVYTLPPSRDELTKNQVSLTCLVKGFYPSDIAVEWESNGQPENNYKTTPPVLDSDGSFFLYSKLTVDKSRWQQGNVFSCSVMHEALHNHYTQKSLSLSPGK

SEQ ID NO: 1229 - DNA, 992 bp, Homo sapiens
ctagcaccaagggcccatcggtcttccccctggcaccctcctccaagagcacctctgggggcacagcggccctgggctgcctggtcaaggactacttccccgaaccggtgacggtgtcgtggaactcaggcgccctgaccagcggcgtgcacaccttcccggctgtcctacagtcctcaggactctactccctcagcagcgtggtgaccgtgccctccagcagcttgggcacccagacctacatctgcaacgtgaatcacaagcccagcaacaccaaggtggacaagaaagcagagcccaaatcttgtgacaaaactcacacatgcccaccgtgcccagcacctgaactcctggggggaccgtcagtcttcctcttccccccaaaacccaaggacaccctcatgatctcccggacccctgaggtcacatgcgtggtggtggacgtgagccacgaagaccctgaggtcaagttcaactggtacgtggacggcgtggaggtgcataatgccaagacaaagccgcgggaggagcagtacaacagcacgtaccgtgtggtcagcgtcctcaccgtcctgcaccaggactggctgaatggcaaggagtacaagtgcaaggtctccaacaaagccctcccagcccccatcgagaaaaccatctccaaagccaaagggcagccccgagaaccacaggtgtacaccctgcccccatcccgggatgagctgaccaagaaccaggtcagcctgacctgcctggtcaaaggcttctatcccagcgacatcgccgtggagtgggagagcaatgggcagccggagaacaactacaagaccacgcctcccgtgctggactccgacggctccttcttcctctacagcaagctcaccgtggacaagagcaggtggcagcaggggaacgtcttctcatgctccgtgatgcatgaggctctgcacaaccactacacgcagaagagcctctccctgtctccgggtaaatga

SEQ ID NO: 1230 - protein, 330 aa, Artificial Sequence
  Description of Artificial Sequence: Synthetic polypeptide
ASTKGPSVFPLAPSSKSTSGGTAALGCLVKDYFPEPVTVSWNSGALTSGVHTFPAVLQSSGLYSLSSVVTVPSSSLGTQTYICNVNHKPSNTKVDKKAEPKSCDKTHTCPPCPAPEAAGGPSVFLFPPKPKDTLMISRTPEVTCVVVDVSHEDPEVKFNWYVDGVEVHNAKTKPREEQYNSTYRVVSVLTVLHQDWLNGKEYKCKVSNKALPAPIEKTISKAKGQPREPQVYTLPPSRDELTKNQVSLTCLVKGFYPSDIAVEWESNGQPENNYKTTPPVLDSDGSFFLYSKLTVDKSRWQQGNVFSCSVMHEALHNHYTQKSLSLSPGK

SEQ ID NO: 1231 - DNA, 992 bp, Artificial Sequence
  Description of Artificial Sequence: Synthetic polynucleotide
ctagcaccaagggcccatcggtcttccccctggcaccctcctccaagagcacctctgggggcacagcggccctgggctgcctggtcaaggactacttccccgaaccggtgacggtgtcgtggaactcaggcgccctgaccagcggcgtgcacaccttcccggctgtcctacagtcctcaggactctactccctcagcagcgtggtgaccgtgccctccagcagcttgggcacccagacctacatctgcaacgtgaatcacaagcccagcaacaccaaggtggacaagaaagcagagcccaaatcttgtgacaaaactcacacatgcccaccgtgcccagcacctgaagccgccgggggaccgtcagtcttcctcttccccccaaaacccaaggacaccctcatgatctcccggacccctgaggtcacatgcgtggtggtggacgtgagccacgaagaccctgaggtcaagttcaactggtacgtggacggcgtggaggtgcataatgccaagacaaagccgcgggaggagcagtacaacagcacgtaccgtgtggtcagcgtcctcaccgtcctgcaccaggactggctgaatggcaaggagtacaagtgcaaggtctccaacaaagccctcccagcccccatcgagaaaaccatctccaaagccaaagggcagccccgagaaccacaggtgtacaccctgcccccatcccgggatgagctgaccaagaaccaggtcagcctgacctgcctggtcaaaggcttctatcccagcgacatcgccgtggagtgggagagcaatgggcagccggagaacaactacaagaccacgcctcccgtgctggactccgacggctccttcttcctctacagcaagctcaccgtggacaagagcaggtggcagcaggggaacgtcttctcatgctccgtgatgcatgaggctctgcacaaccactacacgcagaagagcctctccctgtctccgggtaaatga

SEQ ID NO: 1232 - protein, 97 aa, Homo sapiens
ASTKGPSVFPLAPSSKSTSGGTAALGCLVKDYFPEPVTVSWNSGALTSGVHTFPAVLQSSGLYSLSSVVTVPSSSLGTQTYICNVNHKPSNTKVDKK

SEQ ID NO: 1233 - DNA, 290 bp, Homo sapiens
ctagcaccaagggcccatcggtcttccccctggcaccctcctccaagagcacctctgggggcacagcggccctgggctgcctggtcaaggactacttccccgaaccggtgacggtgtcgtggaactcaggcgccctgaccagcggcgtgcacaccttcccggctgtcctacagtcctcaggactctactccctcagcagcgtggtgaccgtgccctccagcagcttgggcacccagacctacatctgcaacgtgaatcacaagcccagcaacaccaaggtggacaagaaa

SEQ ID NO: 1234 - protein, 110 aa, Homo sapiens
APELLGGPSVFLFPPKPKDTLMISRTPEVTCVVVDVSHEDPEVKFNWYVDGVEVHNAKTKPREEQYNSTYRVVSVLTVLHQDWLNGKEYKCKVSNKALPAPIEKTISKAK

SEQ ID NO: 1235 - DNA, 330 bp, Homo sapiens
gcacctgaactcctggggggaccgtcagtcttcctcttccccccaaaacccaaggacaccctcatgatctcccggacccctgaggtcacatgcgtggtggtggacgtgagccacgaagaccctgaggtcaagttcaactggtacgtggacggcgtggaggtgcataatgccaagacaaagccgcgggaggagcagtacaacagcacgtaccgtgtggtcagcgtcctcaccgtcctgcaccaggactggctgaatggcaaggagtacaagtgcaaggtctccaacaaagccctcccagcccccatcgagaaaaccatctccaaagccaaa

SEQ ID NO: 1236 - protein, 110 aa, Artificial Sequence
  Description of Artificial Sequence: Synthetic polypeptide
APEAAGGPSVFLFPPKPKDTLMISRTPEVTCVVVDVSHEDPEVKFNWYVDGVEVHNAKTKPREEQYNSTYRVVSVLTVLHQDWLNGKEYKCKVSNKALPAPIEKTISKAK

SEQ ID NO: 1237 - DNA, 330 bp, Artificial Sequence
  Description of Artificial Sequence: Synthetic polynucleotide
gcacctgaagccgccgggggaccgtcagtcttcctcttccccccaaaacccaaggacaccctcatgatctcccggacccctgaggtcacatgcgtggtggtggacgtgagccacgaagaccctgaggtcaagttcaactggtacgtggacggcgtggaggtgcataatgccaagacaaagccgcgggaggagcagtacaacagcacgtaccgtgtggtcagcgtcctcaccgtcctgcaccaggactggctgaatggcaaggagtacaagtgcaaggtctccaacaaagccctcccagcccccatcgagaaaaccatctccaaagccaaa

SEQ ID NO: 1238 - protein, 107 aa, Homo sapiens
GQPREPQVYTLPPSRDELTKNQVSLTCLVKGFYPSDIAVEWESNGQPENNYKTTPPVLDSDGSFFLYSKLTVDKSRWQQGNVFSCSVMHEALHNHYTQKSLSLSPGK

SEQ ID NO: 1239 - DNA, 324 bp, Homo sapiens
gggcagccccgagaaccacaggtgtacaccctgcccccatcccgggatgagctgaccaagaaccaggtcagcctgacctgcctggtcaaaggcttctatcccagcgacatcgccgtggagtgggagagcaatgggcagccggagaacaactacaagaccacgcctcccgtgctggactccgacggctccttcttcctctacagcaagctcaccgtggacaagagcaggtggcagcaggggaacgtcttctcatgctccgtgatgcatgaggctctgcacaaccactacacgcagaagagcctctccctgtctccgggtaaatga

SEQ ID NO: 1240 - protein, 16 aa, Homo sapiens
AEPKSCDKTHTCPPCP

SEQ ID NO: 1241 - DNA, 48 bp, Homo sapiens
gcagagcccaaatcttgtgacaaaactcacacatgcccaccgtgccca

SEQ ID NO: 1242 - protein, 453 aa, Homo sapiens
TRVLSQVQLVQSGAEVKKPGASVKVSCKASGYTFSGYSTHWLRQVPGQGLEWIGWDNPSSGDTTYAENFRGRVTLTRDTSITTDYLEVRGLRSDDTAVYYCARGGDDYSFDHWGQGTLVTVSSASTKGPSVFPLAPSSKSTSGGTAALGCLVKDYFPEPVTVSWNSGALTSGVHTFPAVLQSSGLYSLSSVVTVPSSSLGTQTYICNVNHKPSNTKVDKKAEPKSCDKTHTCPPCPAPELLGGPSVFLFPPKPKDTLMISRTPEVTCVVVDVSHEDPEVKFNWYVDGVEVHNAKTKPREEQYNSTYRVVSVLTVLHQDWLNGKEYKCKVSNKALPAPIEKTISKAKGQPREPQVYTLPPSRDELTKNQVSLTCLVKGFYPSDIAVEWESNGQPENNYKTTPPVLDSDGSFFLYSKLTVDKSRWQQGNVFSCSVMHEALHNHYTQKSLSLSPGK

SEQ ID NO: 1243 - protein, 453 aa, Artificial Sequence
  Description of Artificial Sequence: Synthetic polypeptide
TRVLSQVQLVQSGAEVKKPGASVKVSCKASGYTFSGYSTHWLRQVPGQGLEWIGWDNPSSGDTTYAENFRGRVTLTRDTSITTDYLEVRGLRSDDTAVYYCARGGDDYSFDHWGQGTLVTVSSASTKGPSVFPLAPSSKSTSGGTAALGCLVKDYFPEPVTVSWNSGALTSGVHTFPAVLQSSGLYSLSSVVTVPSSSLGTQTYICNVNHKPSNTKVDKKAEPKSCDKTHTCPPCPAPEAAGGPSVFLFPPKPKDTLMISRTPEVTCVVVDVSHEDPEVKFNWYVDGVEVHNAKTKPREEQYNSTYRVVSVLTVLHQDWLNGKEYKCKVSNKALPAPIEKTISKAKGQPREPQVYTLPPSRDELTKNQVSLTCLVKGFYPSDIAVEWESNGQPENNYKTTPPVLDSDGSFFLYSKLTVDKSRWQQGNVFSCSVMHEALHNHYTQKSLSLSPGK

SEQ ID NO: 1244 - protein, 5 aa, Artificial Sequence
  Description of Artificial Sequence: Synthetic peptide
GYSTH

SEQ ID NO: 1245 - protein, 17 aa, Artificial Sequence
  Description of Artificial Sequence: Synthetic peptide
WDNPSSGDTTYAENFRG

SEQ ID NO: 1246 - protein, 9 aa, Artificial Sequence
  Description of Artificial Sequence: Synthetic peptide
GGDDYSFDH

SEQ ID NO: 1247 - protein, 11 aa, Artificial Sequence
  Description of Artificial Sequence: Synthetic peptide
RGDSLRSYYAS

SEQ ID NO: 1248 - protein, 7 aa, Artificial Sequence
  Description of Artificial Sequence: Synthetic peptide
GENNRPS

SEQ ID NO: 1249 - protein, 11 aa, Artificial Sequence
  Description of Artificial Sequence: Synthetic peptide
NSRDSSDHLLL

SEQ ID NO: 1250 - protein, 121 aa, Homo sapiens; identical to SEQ ID NO: 845

SEQ ID NO: 1251 - protein, 113 aa, Homo sapiens; identical to SEQ ID NO: 846

SEQ ID NO: 1252 - protein, 119 aa, Homo sapiens; identical to SEQ ID NO: 847

SEQ ID NO: 1253 - protein, 119 aa, Homo sapiens; identical to SEQ ID NO: 848

SEQ ID NO: 1254 - protein, 119 aa, Homo sapiens; identical to SEQ ID NO: 848

SEQ ID NO: 1255 - protein, 119 aa, Homo sapiens; identical to SEQ ID NO: 850

SEQ ID NO: 1256 - protein, 119 aa, Homo sapiens; identical to SEQ ID NO: 851

SEQ ID NO: 1257 - protein, 118 aa, Homo sapiens; identical to SEQ ID NO: 852

SEQ ID NO: 1258 - protein, 119 aa, Homo sapiens; identical to SEQ ID NO: 853

SEQ ID NO: 1259 - protein, 119 aa, Homo sapiens; identical to SEQ ID NO: 848

SEQ ID NO: 1260 - protein, 119 aa, Homo sapiens; identical to SEQ ID NO: 855

SEQ ID NO: 1261 - protein, 116 aa, Homo sapiens; identical to SEQ ID NO: 856

SEQ ID NO: 1262 - protein, 119 aa, Homo sapiens; identical to SEQ ID NO: 857

SEQ ID NO: 1263 - protein, 122 aa, Homo sapiens; identical to SEQ ID NO: 858

SEQ ID NO: 1264 - protein, 118 aa, Homo sapiens; identical to SEQ ID NO: 859

SEQ ID NO: 1265 - protein, 118 aa, Homo sapiens; identical to SEQ ID NO: 859

SEQ ID NO: 1266 - protein, 116 aa, Homo sapiens; identical to SEQ ID NO: 861

SEQ ID NO: 1267 - protein, 118 aa, Homo sapiens; identical to SEQ ID NO: 862

SEQ ID NO: 1268 - protein, 122 aa, Homo sapiens; identical to SEQ ID NO: 863

SEQ ID NO: 1269 - protein, 119 aa, Homo sapiens; identical to SEQ ID NO: 864

SEQ ID NO: 1270 - protein, 119 aa, Homo sapiens; identical to SEQ ID NO: 851

SEQ ID NO: 1271 - protein, 121 aa, Homo sapiens; identical to SEQ ID NO: 866

SEQ ID NO: 1272 - protein, 118 aa, Homo sapiens; identical to SEQ ID NO: 867

SEQ ID NO: 1273 - protein, 112 aa, Homo sapiens; identical to SEQ ID NO: 868

SEQ ID NO: 1274 - protein, 111 aa, Homo sapiens; identical to SEQ ID NO: 869

SEQ ID NO: 1275 - protein, 112 aa, Homo sapiens; identical to SEQ ID NO: 870

SEQ ID NO: 1276 - protein, 112 aa, Homo sapiens; identical to SEQ ID NO: 871

SEQ ID NO: 1277 - protein, 112 aa, Homo sapiens; identical to SEQ ID NO: 872

SEQ ID NO: 1278 - protein, 111 aa, Homo sapiens; identical to SEQ ID NO: 873

SEQ ID NO: 1279 - protein, 111 aa, Homo sapiens; identical to SEQ ID NO: 874

SEQ ID NO: 1280 - protein, 111 aa, Homo sapiens; identical to SEQ ID NO: 875

SEQ ID NO: 1281 - protein, 112 aa, Homo sapiens; identical to SEQ ID NO: 876

SEQ ID NO: 1282 - protein, 112 aa, Homo sapiens; identical to SEQ ID NO: 877

SEQ ID NO: 1283 - protein, 111 aa, Homo sapiens; identical to SEQ ID NO: 878

SEQ ID NO: 1284 - protein, 111 aa, Homo sapiens; identical to SEQ ID NO: 879

SEQ ID NO: 1285 - protein, 112 aa, Homo sapiens; identical to SEQ ID NO: 880

SEQ ID NO: 1286 - protein, 112 aa, Homo sapiens; identical to SEQ ID NO: 881
  MOD_RES (83)..(83): Any naturally occurring amino acid

SEQ ID NO: 1287 - protein, 110 aa, Homo sapiens; identical to SEQ ID NO: 882

SEQ ID NO: 1288 - protein, 112 aa, Homo sapiens; identical to SEQ ID NO: 883

SEQ ID NO: 1289 - protein, 112 aa, Homo sapiens; identical to SEQ ID NO: 883

SEQ ID NO: 1290 - protein, 111 aa, Homo sapiens; identical to SEQ ID NO: 885

SEQ ID NO: 1291 - protein, 112 aa, Homo sapiens; identical to SEQ ID NO: 886

SEQ ID NO: 1292 - protein, 109 aa, Homo sapiens; identical to SEQ ID NO: 887

SEQ ID NO: 1293 - protein, 109 aa, Homo sapiens; identical to SEQ ID NO: 888

SEQ ID NO: 1294 - protein, 458 aa, Homo sapiens; identical to SEQ ID NO: 889

SEQ ID NO: 1295 - protein, 437 aa, Mus musculus; identical to SEQ ID NO: 890

SEQ ID NO: 1296 - DNA, 38 bp, Artificial Sequence; identical to SEQ ID NO: 891
  Description of Artificial Sequence: Synthetic Chemically synthesized primer

SEQ ID NO: 1297 - DNA, 32 bp, Artificial Sequence; identical to SEQ ID NO: 892
  Description of Artificial Sequence: Synthetic Chemically synthesized primer

SEQ ID NO: 1298 - DNA, 35 bp, Artificial Sequence; identical to SEQ ID NO: 893
  Description of Artificial Sequence: Synthetic Chemically synthesized primer

SEQ ID NO: 1299 - DNA, 31 bp, Artificial Sequence; identical to SEQ ID NO: 894
  Description of Artificial Sequence: Synthetic Chemically synthesized primer

SEQ ID NO: 1300 - DNA, 41 bp, Artificial Sequence; identical to SEQ ID NO: 895
  Description of Artificial Sequence: Synthetic Chemically synthesized primer

SEQ ID NO: 1301 - DNA, 32 bp, Artificial Sequence; identical to SEQ ID NO: 896
  Description of Artificial Sequence: Synthetic Chemically synthesized primer

SEQ ID NO: 1302 - DNA, 35 bp, Artificial Sequence; identical to SEQ ID NO: 897
  Description of Artificial Sequence: Synthetic Chemically synthesized primer

SEQ ID NO: 1303 - DNA, 26 bp, Artificial Sequence
  Description of Artificial Sequence: Synthetic Chemically synthesized primer
atagcacctaggacggtcagcttggt

SEQ ID NO: 1304 - protein, 5 aa, Artificial Sequence
  Description of Artificial Sequence: Synthetic Portion of CDR1 heavy chain sequence
SYAMS

SEQ ID NO: 1305 - protein, 5 aa, Artificial Sequence
  Description of Artificial Sequence: Synthetic Portion of CDR1 heavy chain sequence
  MOD_RES (1)..(1): Any naturally occurring amino acid
  MOD_RES (5)..(5): Any naturally occurring amino acid
XYAMX

SEQ ID NO: 1306 - protein, 5 aa, Artificial Sequence
  Description of Artificial Sequence: Synthetic Portion of CDR1 heavy chain sequence
  MOD_RES (3)..(3): Any naturally occurring amino acid
  MOD_RES (5)..(5): Any naturally occurring amino acid
SYXMX

SEQ ID NO: 1307 - protein, 17 aa, Artificial Sequence
  Description of Artificial Sequence: Synthetic Portion of CDR2 heavy chain sequence
  MOD_RES (4)..(5): Any naturally occurring amino acid
  MOD_RES (8)..(8): Any naturally occurring amino acid
  MOD_RES (10)..(11): Any naturally occurring amino acid
AISXXGGXTXXADSVKG

SEQ ID NO: 1308 - protein, 17 aa, Artificial Sequence
  Description of Artificial Sequence: Synthetic Portion of CDR2 heavy chain sequence
AISGSGGSTTTADSVKG

SEQ ID NO: 1309 - protein, 13 aa, Artificial Sequence
  Description of Artificial Sequence: Synthetic Portion of CDR3 heavy chain sequence
  MOD_RES (9)..(9): Any naturally occurring amino acid
NGNYRGSLXAFDI

SEQ ID NO: 1310 - protein, 14 aa, Artificial Sequence
  Description of Artificial Sequence: Synthetic Portion of CDR1 light chain sequence
TGSSSNIGAGYDVH

SEQ ID NO: 1311 - protein, 7 aa, Artificial Sequence
  Description of Artificial Sequence: Synthetic Portion of CDR2 light chain sequence
GNNNRPS

SEQ ID NO: 1312 - protein, 12 aa, Artificial Sequence
  Description of Artificial Sequence: Synthetic Portion of CDR3 light chain sequence
QSYDSSLSAWVV

SEQ ID NO: 1313 - protein, 6 aa, Artificial Sequence
  Description of Artificial Sequence: Synthetic Consensus sequence
EEDLPE

SEQ ID NO: 1314 - protein, 10 aa, Artificial Sequence
  Description of Artificial Sequence: Synthetic Portion of the CDR3 heavy chain sequence
NGNYRGAFDI

SEQ ID NO: 1315 - DNA, 354 bp, Artificial Sequence
  Description of Artificial Sequence: Synthetic polynucleotide
caggtgcagctggtgcagagcggcgcggaagtgaaaaaaccgggcgcgagcgtgaaagtgagctgcaaagcgagcggctatacctttgcgagcgcgtggatgcattggatgcgccaggcgccgggccagggcctggaatggattggctggattaacccgggcaacgtgaacaccaaatataacgaaaaatttaaaggccgcgcgaccctgaccgtggataccagcaccaacaccgcgtatatggaactgagcagcctgcgcagcgaagataccgcggtgtattattgcgcgcgcagcacctattatcgcccgctggattattggggccagggcaccctggtgaccgtgagcagc

SEQ ID NO: 1316 - protein, 118 aa, Artificial Sequence; identical to SEQ ID NO: 1199
  Description of Artificial Sequence: Synthetic polypeptide

SEQ ID NO: 1317 - DNA, 336 bp, Artificial Sequence
  Description of Artificial Sequence: Synthetic polynucleotide
gatattgtgatgacccagagcccggatagcctggcggtgagcctgggcgaacgcgcgaccattaactgcaaaagcagccagagcattctgtatagcagcaaccagaaaaactatctggcgtggtatcagcagaaaccgggccagagcccgaaactgctgatttattgggcgagcacccgcgaaagcggcgtgccggatcgctttagcggcagcggcagcggcaccgattttaccctgaccattagcagcctgcaggcggaagatgtggcggtgtattattgccatcagtatatgagcagctatacctttggccagggcaccaaactggaaattaaa

SEQ ID NO: 1318 - protein, 112 aa, Artificial Sequence; identical to SEQ ID NO: 1201
  Description of Artificial Sequence: Synthetic polypeptide

SEQ ID NO: 1319 - DNA, 981 bp, Artificial Sequence
  Description of Artificial Sequence: Synthetic polynucleotide
gcgagcaccaaaggcccgagcgtgtttccgctggcgccgtgcagccgcagcaccagcgaaagcaccgcggcgctgggctgcctggtgaaagattattttccggaaccggtgaccgtgagctggaacagcggcgcgctgaccagcggcgtgcatacctttccggcggtgctgcagagcagcggcctgtatagcctgagcagcgtggtgaccgtgccgagcagcagcctgggcaccaaaacctatacctgcaacgtggatcataaaccgagcaacaccaaagtggataaacgcgtggaaagcaaatatggcccgccgtgcccgagctgcccggcgccggaatttctgggcggcccgagcgtgtttctgtttccgccgaaaccgaaagataccctgatgattagccgcaccccggaagtgacctgcgtggtggtggatgtgagccaggaagatccggaagtgcagtttaactggtatgtggatggcgtggaagtgcataacgcgaaaaccaaaccgcgcgaagaacagtttaacagcacctatcgcgtggtgagcgtgctgaccgtgctgcatcaggattggctgaacggcaaagaatataaatgcaaagtgagcaacaaaggcctgccgagcagcattgaaaaaaccattagcaaagcgaaaggccagccgcgcgaaccgcaggtgtataccctgccgccgagcccggaagaaatgaccaaaaaccaggtgagcctgacctgcctggtgaaaggcttttatccgagcgatattgcggtggaatgggaaagcaacggccagccggaaaacaactataaaaccaccccgccggtgctggatagcgatggcagcttttttctgtatagccgcctgaccgtggataaaagccgctggcaggaaggcaacgtgtttagctgcagcgtgatgcatgaagcgctgcataaccattatacccagaaaagcctgagcctgagcctgggcaaa

SEQ ID NO: 1320 - protein, 327 aa, Artificial Sequence
  Description of Artificial Sequence: Synthetic polypeptide
ASTKGPSVFPLAPCSRSTSESTAALGCLVKDYFPEPVTVSWNSGALTSGVHTFPAVLQSSGLYSLSSVVTVPSSSLGTKTYTCNVDHKPSNTKVDKRVESKYGPPCPSCPAPEFLGGPSVFLFPPKPKDTLMISRTPEVTCVVVDVSQEDPEVQFNWYVDGVEVHNAKTKPREEQFNSTYRVVSVLTVLHQDWLNGKEYKCKVSNKGLPSSIEKTISKAKGQPREPQVYTLPPSPEEMTKNQVSLTCLVKGFYPSDIAVEWESNGQPENNYKTTPPVLDSDGSFFLYSRLTVDKSRWQEGNVFSCSVMHEALHNHYTQKSLSLSLGK

SEQ ID NO: 1321 - DNA, 975 bp, Artificial Sequence
  Description of Artificial Sequence: Synthetic polynucleotide
accaaaggcccgagcgtgtttccgctggcgccgtgcagccgcagcaccagcgaaagcaccgcggcgctgggctgcctggtgaaagattattttccggaaccggtgaccgtgagctggaacagcggcgcgctgaccagcggcgtgcatacctttccggcggtgctgcagagcagcggcctgtatagcctgagcagcgtggtgaccgtgccgagcagcagcctgggcaccaaaacctatacctgcaacgtggatcataaaccgagcaacaccaaagtggataaacgcgtggaaagcaaatatggcccgccgtgcccgccgtgcccggcgccggaatttctgggcggcccgagcgtgtttctgtttccgccgaaaccgaaagataccctgatgattagccgcaccccggaagtgacctgcgtggtggtggatgtgagccaggaagatccggaagtgcagtttaactggtatgtggatggcgtggaagtgcataacgcgaaaaccaaaccgcgcgaagaacagtttaacagcacctatcgcgtggtgagcgtgctgaccgtgctgcatcaggattggctgaacggcaaagaatataaatgcaaagtgagcaacaaaggcctgccgagcagcattgaaaaaaccattagcaaagcgaaaggccagccgcgcgaaccgcaggtgtataccctgccgccgagcccggaagaaatgaccaaaaaccaggtgagcctgacctgcctggtgaaaggcttttatccgagcgatattgcggtggaatgggaaagcaacggccagccggaaaacaactataaaaccaccccgccggtgctggatagcgatggcagcttttttctgtatagcaaactgaccgtggataaaagccgctggcaggaaggcaacgtgtttagctgcagcgtgatgcatgaagcgctgcataaccattatacccagaaaagcctgagcctgagcctgggcaaa

SEQ ID NO: 1322 - protein, 325 aa, Artificial Sequence
  Description of Artificial Sequence: Synthetic polypeptide
TKGPSVFPLAPCSRSTSESTAALGCLVKDYFPEPVTVSWNSGALTSGVHTFPAVLQSSGLYSLSSVVTVPSSSLGTKTYTCNVDHKPSNTKVDKRVESKYGPPCPPCPAPEFLGGPSVFLFPPKPKDTLMISRTPEVTCVVVDVSQEDPEVQFNWYVDGVEVHNAKTKPREEQFNSTYRVVSVLTVLHQDWLNGKEYKCKVSNKGLPSSIEKTISKAKGQPREPQVYTLPPSPEEMTKNQVSLTCLVKGFYPSDIAVEWESNGQPENNYKTTPPVLDSDGSFFLYSKLTVDKSRWQEGNVFSCSVMHEALHNHYTQKSLSLSLGK

SEQ ID NO: 1323 - protein, 8 aa, Artificial Sequence
  Description of Artificial Sequence: Synthetic peptide
GYTFASAW

SEQ ID NO: 1324 - protein, 12 aa, Artificial Sequence
  Description of Artificial Sequence: Synthetic peptide
QSILYSSNQKNY

SEQ ID NO: 1325 - protein, 8 aa, Artificial Sequence
  Description of Artificial Sequence: Synthetic peptide
INPGNVNT

SEQ ID NO: 1326 - protein, 6 aa, Artificial Sequence
  Description of Artificial Sequence: Synthetic peptide
WASTRE

SEQ ID NO: 1327 - protein, 9 aa, Artificial Sequence
  Description of Artificial Sequence: Synthetic peptide
STYYRPLDY

SEQ ID NO: 1328 - protein, 8 aa, Artificial Sequence
  Description of Artificial Sequence: Synthetic peptide
HQYMSSYT

SEQ ID NO: 1329 - DNA, 354 bp, Artificial Sequence; identical to SEQ ID NO: 1182
  Description of Artificial Sequence: Synthetic polynucleotide

SEQ ID NO: 1330 - protein, 118 aa, Artificial Sequence; identical to SEQ ID NO: 1183
  Description of Artificial Sequence: Synthetic polypeptide

SEQ ID NO: 1331 - DNA, 336 bp, Artificial Sequence; identical to SEQ ID NO: 1184
  Description of Artificial Sequence: Synthetic polynucleotide

SEQ ID NO: 1332 - protein, 112 aa, Artificial Sequence; identical to SEQ ID NO: 1185
  Description of Artificial Sequence: Synthetic polypeptide

SEQ ID NO: 1333 - DNA, 354 bp, Artificial Sequence; identical to SEQ ID NO: 1186
  Description of Artificial Sequence: Synthetic polynucleotide

SEQ ID NO: 1334 - protein, 118 aa, Artificial Sequence; identical to SEQ ID NO: 1187
  Description of Artificial Sequence: Synthetic polypeptide

SEQ ID NO: 1335 - DNA, 336 bp, Artificial Sequence; identical to SEQ ID NO: 1188
  Description of Artificial Sequence: Synthetic polynucleotide

SEQ ID NO: 1336 - protein, 112 aa, Artificial Sequence; identical to SEQ ID NO: 1189
  Description of Artificial Sequence: Synthetic polypeptide

SEQ ID NO: 1337 - DNA, 354 bp, Artificial Sequence; identical to SEQ ID NO: 1190
  Description of Artificial Sequence: Synthetic polynucleotide

SEQ ID NO: 1338 - protein, 118 aa, Artificial Sequence; identical to SEQ ID NO: 1191
  Description of Artificial Sequence: Synthetic polypeptide

SEQ ID NO: 1339 - DNA, 336 bp, Artificial Sequence; identical to SEQ ID NO: 1192
  Description of Artificial Sequence: Synthetic polynucleotide

SEQ ID NO: 1340 - protein, 112 aa, Artificial Sequence; identical to SEQ ID NO: 1193
  Description of Artificial Sequence: Synthetic polypeptide

SEQ ID NO: 1341 - DNA, 354 bp, Artificial Sequence; identical to SEQ ID NO: 1194
  Description of Artificial Sequence: Synthetic polynucleotide

SEQ ID NO: 1342 - protein, 118 aa, Artificial Sequence; identical to SEQ ID NO: 1195
  Description of Artificial Sequence: Synthetic polypeptide

SEQ ID NO: 1343 - DNA, 336 bp, Artificial Sequence; identical to SEQ ID NO: 1196
  Description of Artificial Sequence: Synthetic polynucleotide

SEQ ID NO: 1344 - protein, 112 aa, Artificial Sequence; identical to SEQ ID NO: 1197
  Description of Artificial Sequence: Synthetic polypeptide

SEQ ID NO: 1345 - protein, 8 aa, Artificial Sequence
  Description of Artificial Sequence: Synthetic peptide
GYTFASYY

SEQ ID NO: 1346 - protein, 8 aa, Artificial Sequence
  Description of Artificial Sequence: Synthetic peptide
GYTFASYY

SEQ ID NO: 1347 - protein, 8 aa, Artificial Sequence
  Description of Artificial Sequence: Synthetic peptide
GYTFASSW

SEQ ID NO: 1348 - protein, 9 aa, Artificial Sequence
  Description of Artificial Sequence: Synthetic peptide
STWYRPLDY

SEQ ID NO: 1349 - protein, 9 aa, Artificial Sequence
  Description of Artificial Sequence: Synthetic peptide
STWYRPNDY

SEQ ID NO: 1350 - protein, 9 aa, Artificial Sequence
  Description of Artificial Sequence: Synthetic peptide
TTRYRPLDY

SEQ ID NO: 1351 - protein, 9 aa, Artificial Sequence
  Description of Artificial Sequence: Synthetic peptide
LTYYRPPDY

SEQ ID NO: 1352 - protein, 8 aa, Artificial Sequence
  Description of Artificial Sequence: Synthetic peptide
HQYLSSYT

SEQ ID NO: 1353 - protein, 8 aa, Artificial Sequence
  Description of Artificial Sequence: Synthetic peptide
HQYISSYT

SEQ ID NO: 1354 - protein, 8 aa, Artificial Sequence
  Description of Artificial Sequence: Synthetic peptide
HQYKSSYT

SEQ ID NO: 1355 - protein, 8 aa, Artificial Sequence
  Description of Artificial Sequence: Synthetic peptide
HQYRSSYT

SEQ ID NO: 1356 - protein, 8 aa, Artificial Sequence
  Description of Artificial Sequence: Synthetic peptide
HQYYSSYT

SEQ ID NO: 1357 - DNA, 354 bp, Artificial Sequence; identical to SEQ ID NO: 966
  Description of Artificial Sequence: Synthetic polynucleotide

SEQ ID NO: 1358 - protein, 118 aa, Artificial Sequence; identical to SEQ ID NO: 967
  Description of Artificial Sequence: Synthetic polypeptide

SEQ ID NO: 1359 - DNA, 336 bp, Artificial Sequence; identical to SEQ ID NO: 968
  Description of Artificial Sequence: Synthetic polynucleotide

SEQ ID NO: 1360 - protein, 112 aa, Artificial Sequence; identical to SEQ ID NO: 969
  Description of Artificial Sequence: Synthetic polypeptide

SEQ ID NO: 1361 - DNA, 360 bp, Artificial Sequence
  Description of Artificial Sequence: Synthetic polynucleotide
gaggtgcagctggtggagtctggggctgaggtgaagaagcctggggcctcagtgaaggtctcctgcaagacttctggatacaccttcaccgaccactatatccactgggtgcgacaggcccctggacaagggcttgagtggatgggatggatcaaccctagcagtggtggcacagagtatgcacagaagtttcagggcagggtcaccatgaccagggacacgcccattagcacggcctacatggatctgagcgggctgagatctgacgacacggccgtttattactgtgcgagagagactatcggtggctggaacgctttggacgtctggggccaaggaaccctggtcaccgtctcctca

SEQ ID NO: 1362 - protein, 120 aa, Artificial Sequence
  Description of Artificial Sequence: Synthetic polypeptide
EVQLVESGAEVKKPGASVKVSCKTSGYTFTDHYIHWVRQAPGQGLEWMGWINPSSGGTEYAQKFQGRVTMTRDTPISTAYMDLSGLRSDDTAVYYCARETIGGWNALDVWGQGTLVTVSS

SEQ ID NO: 1363 - DNA, 333 bp, Artificial Sequence
  Description of Artificial Sequence: Synthetic polynucleotide
cagcctgtgctgactcagccaccctcagcgtctgggacccccgggcagagggtcaccatctcttgttctggaagcagctccaacatcggaattaatactgtaaactggtaccagcagctcccaagaacgccccccaaactcctcatctatactaataatcagcggccctcaggggtccctgaccgattctctggctccaagtctgacacctcagcctccctggccatcagtggcctccagtctgaggatgaggctgattattactgtgcagcttgggatgacaccctgaatggtccactattcggcggagggaccaaggtgaccgtcctaggt

SEQ ID NO: 1364 - protein, 111 aa, Artificial Sequence
  Description of Artificial Sequence: Synthetic polypeptide
QPVLTQPPSASGTPGQRVTISCSGSSSNIGINTVNWYQQLPRTPPKLLIYTNNQRPSGVPDRFSGSKSDTSASLAISGLQSEDEADYYCAAWDDTLNGPLFGGGTKVTVLG

SEQ ID NO: 1365 - DNA, 357 bp, Artificial Sequence
  Description of Artificial Sequence: Synthetic polynucleotide
gaggtgcagctggtgcagtctgggtctgagttgaagaagcctggggcctcagtgaaggtctcctgcaaggcttctggatacaccttcaccggctactatatgcactgggtgcgacaggcccctggacaagggcttgagtggatgggatggatcaaccctaacagtggtggcacaaactatgcacagaagtttcagggcagggtcaccgtgaccacagacacgtccacgagcacagcctacatggagctgaggagcctgagatctgacgacacggccgtctattactgtgcgagagagggtgttcactcggatgcttttgatgtgtggggccaagggaccacggtcaccgtctcctca

SEQ ID NO: 1366 - protein, 119 aa, Artificial Sequence
  Description of Artificial Sequence: Synthetic polypeptide
EVQLVQSGSELKKPGASVKVSCKASGYTFTGYYMHWVRQAPGQGLEWMGWINPNSGGTNYAQKFQGRVTVTTDTSTSTAYMELRSLRSDDTAVYYCAREGVHSDAFDVWGQGTTVTVSS

SEQ ID NO: 1367 - DNA, 321 bp, Artificial Sequence
  Description of Artificial Sequence: Synthetic polynucleotide
gaaacgacactcacgcagtctccagccaccctgtctgtgtctccaggggaaagggccaccctctcctgcagggccagtcagagtgtttacaccaacttagcctggtaccaacagaaacctggccaggctcccagtctcctcatctatggtgcatccagccgggccaccggcatcccagacagattcagtggcagcgggtctgggacagacttcactctcaccatcagcagactggagcctgaagattttgcagtgtattactgtcagcagtatggtagctcacatttcactttcggccctgggaccaaagtggatatcaaa

SEQ ID NO: 1368 - protein, 107 aa, Artificial Sequence
  Description of Artificial Sequence: Synthetic polypeptide
ETTLTQSPATLSVSPGERATLSCRASQSVYTNLAWYQQKPGQAPSLLIYGASSRATGIPDRFSGSGSGTDFTLTISRLEPEDFAVYYCQQYGSSHFTFGPGTKVDIK

SEQ ID NO: 1369 - DNA, 360 bp, Artificial Sequence
  Description of Artificial Sequence: Synthetic polynucleotide
gaggtgcagctggtgcagtctggggctgaggtgaagaagcctggggcctcagtgaaggtctcctgcaagacttctggatacaccttcaccgaccactatatccactgggtgcgacaggcccctggacaagggcttgagtggatgggatggatcaaccctagcagtggtggcacagagtatgcacagaagtttcagggcagggtcaccatgaccagggacacgcccattagcacggcctacatggatctgagcgggctgagatctgacgacacggccgtttattactgtgcgagagagactatcggtggctggaacgctttggacgtctggggccaagggaccacggtcaccgtctcctca

SEQ ID NO: 1370 - protein, 120 aa, Artificial Sequence
  Description of Artificial Sequence: Synthetic polypeptide
EVQLVQSGAEVKKPGASVKVSCKTSGYTFTDHYIHWVRQAPGQGLEWMGWINPSSGGTEYAQKFQGRVTMTRDTPISTAYMDLSGLRSDDTAVYYCARETIGGWNALDVWGQGTTVTVSS

SEQ ID NO: 1371 - DNA, 333 bp, Artificial Sequence
  Description of Artificial Sequence: Synthetic polynucleotide
cagtctgtgctgactcagccaccctcagcgtctgggtcccccgggcagagggtcaccatgtcttgctctggaagcagctccaccatcgggaggcattctgtaaactggtaccagcagctcccaggaacggcccccaaactcctcatctatgctaacaatcagcggccctcaggggtccctggccgattctctgcctccaagtctgacacctcagcctccctggccatcagtgggctccggtccgaggatgaggctaattattactgtgcagcgtgggatgacagtctcagtggcgtgctctttggcggtgggaccaaggtgaccgtcctaggt

SEQ ID NO: 1372 - protein, 111 aa, Artificial Sequence
  Description of Artificial Sequence: Synthetic polypeptide
QSVLTQPPSASGSPGQRVTMSCSGSSSTIGRHSVNWYQQLPGTAPKLLIYANNQRPSGVPGRFSASKSDTSASLAISGLRSEDEANYYCAAWDDSLSGVLFGGGTKVTVLG

SEQ ID NO: 1373 - DNA, 360 bp, Artificial Sequence
  Description of Artificial Sequence: Synthetic polynucleotide
gaggtgcagctggtggagtctggggctgaggtgaagaagcctggggcctcagtgaaggtctcctgcaagacttctggatacaccttcaccgaccactatatccactgggtgcgacaggcccctggacaagggcttgagtggatgggatggatcaaccctagcagtggtggcacagagtatgcacagaagtttcagggcagggtcaccatgaccagggacacgcccattagcacggcctacatggatctgagcgggctgagatctgacgacacggccgtttattactgtgcgagagagactatcggtggctggaacgctttggacgtctggggccaaggcaccctggtcaccgtctcctca

SEQ ID NO: 1374 - protein, 120 aa, Artificial Sequence; identical to SEQ ID NO: 1362
  Description of Artificial Sequence: Synthetic polypeptide

SEQ ID NO: 1375 - DNA, 327 bp, Artificial Sequence
  Description of Artificial Sequence: Synthetic polynucleotide
ctgcctgtgctgactcagccaccctcagtgtcagtggccccaggacagacggccaggataacctgtgggggacacaagattggaactaaaagtgtgcactggtaccagcagaagccaggccaggcccctgtactggtcgtctatgatgatcgcgaccggccctcagggatccctgagcgattctctggctccaactctgggggcacggccaccctgaccatcagcagggtcgaagccggggatgaggccgactattactgtcaggtgtgggatagtaatagtgatcatgtggtgttcggcggagggaccaagctgaccgtcctaagt

SEQ ID NO: 1376 - protein, 109 aa, Artificial Sequence
  Description of Artificial Sequence: Synthetic polypeptide
MPVLTQPPSVSVAPGQTARITCGGHKIGTKSVHWYQQKPGQAPVLVVYDDRDRPSGIPERFSGSNSGGTATLTISRVEAGDEADYYCQVWDSNSDHVVFGGGTKLTVLS

SEQ ID NO: 1377 - DNA, 360 bp, Artificial Sequence
  Description of Artificial Sequence: Synthetic polynucleotide
gaggtgcagctggtgcagtctggggctgatgtgaagaagcctggggcctcagtgaaggtctcctgcaaggcttctggatacaccttcaccggctactatatacactgggtgcgacaggcccctggacaagggcttgagtggatgggatggatcaaccctaacagtggtggcacaaactatgcacagaagtttcagggcagggtcaccatgaccagggacacgtccatcagcacagcctacatggagctgagcaggctgagatctgacgacacggccgtctatttttgtgtgagagaggtgaaagattactattattacatggacgtctggggcagagggaccacggtcaccgtctcctca

SEQ ID NO: 1378 - protein, 120 aa, Artificial Sequence
  Description of Artificial Sequence: Synthetic polypeptide
EVQLVQSGADVKKPGASVKVSCKASGYTFTGYYIHWVRQAPGQGLEWMGWINPNSGGTNYAQKFQGRVTMTRDTSISTAYMELSRLRSDDTAVYFCVREVKDYYYYMDVWGRGTTVTVSS

SEQ ID NO: 1379 - DNA, 336 bp, Artificial Sequence
  Description of Artificial Sequence: Synthetic polynucleotide
aattttatgctgactcagccccactctgtgtcggaatctccggggaagacggttaccatctcgtgcacccgcagcagcggcagcattgccagcaactccgtgcagtggtacctgcagcgcccgggcagtgcccccaccactctgatctttgacaataaacaaagaccgtctggggtccctgatcgcttctctggctccatcgacagctcctccaactctgcctccctcagcatctctgggctgacgactgaggacgaggctgactatttctgtcagtcttatgatgacagtgagcaagtggtgttcggcggagggaccaagctgaccgtcctaagt

SEQ ID NO: 1380 - protein, 112 aa, Artificial Sequence
  Description of Artificial Sequence: Synthetic polypeptide
NFMLTQPHSVSESPGKTVTISCTRSSGSIASNSVQWYLQRPGSAPTTLIFDNKQRPSGVPDRFSGSIDSSSNSASLSISGLTTEDEADYFCQSYDDSEQVVFGGGTKLTVLS

SEQ ID NO: 1381 - DNA, 363 bp, Artificial Sequence
  Description of Artificial Sequence: Synthetic polynucleotide
gaggtgcagctggtggagtctggggctgaggtgaagaagcctggggcctcagtgaaggtctcctgcaaggcttctggatacaccttcaccggctactatatgcactgggtgcgacaggcccctggacaagggcttgagtggttggggtgggtcaaccctcacagtggtggcacaaactatgcacagaagtttcagggcagggtcaccatgaccagggacacgtccatcagcacagcctacatggagctgagcagactgagatctgacgacacggccgtatattactgtgcgagagagactgatatctctgctaattatcactttgactactggggccagggcaccctggtcaccgtctcctca

SEQ ID NO: 1382 - protein, 121 aa, Artificial Sequence
  Description of Artificial Sequence: Synthetic polypeptide
EVQLVESGAEVKKPGASVKVSCKASGYTFTGYYMHWVRQAPGQGLEWLGWVNPHSGGTNYAQKFQGRVTMTRDTSISTAYMELSRLRSDDTAVYYCARETDISANYHFDYWGQGTLVTVSS

SEQ ID NO: 1383 - DNA, 336 bp, Artificial Sequence
  Description of Artificial Sequence: Synthetic polynucleotide
cagtctgccctgactcagcctgcctccgtgtctgggtctcctggacagtcgatcaccatctcctgcactggaaccagcagtgatgttgggagttataacgctgtctcctggtaccaacaccacccaggcaaagcccccaaactcatgatttatgaggtcagtaagcggccctcaggggtttctaatcggttctctggctccaagtctggcaacacggcctccctgacaatctctgggctccgggctgaggacgaggctgattattattgtgcaacatgggatgacagcctgaaaggtccggtgttcggcggagggaccaagctgaccgtcctgggt

SEQ ID NO: 1384 - protein, 113 aa, Artificial Sequence
  Description of Artificial Sequence: Synthetic polypeptide
QSALTQPASVSGSPGQSITISCTGTSSDVGSYNAVSWYQHHPGKAPKLMIYEVSKRPSGVSNRFSGSKSGNTASLTISGLRAEDEADYYCATWDDSLKGPVFGGGTKLTVLGE

SEQ ID NO: 1385 - DNA, 360 bp, Artificial Sequence
  Description of Artificial Sequence: Synthetic polynucleotide
gaggtgcagctggtgcagtctggggctgaggtgaagaagcctggggcctcagtgaaggtctcctgcaaggcttctggatacaccttcaccggctactatatgcactgggtgcgacaggcccctggacaagggcttgaatggatgggatggatcaaccctaaaactggtgacacaaactatgcacagaagtttcagggcagggtcgccttgagcagggacacgtccttcaacacagcctacatggacctgagcagcctcagatctgacgacacggccgtctattactgtgcgagagagggcctgtcgaccagcagtccccttgactactggggccagggaaccctggtcaccgtctcctca

SEQ ID NO: 1386 - protein, 120 aa, Artificial Sequence
  Description of Artificial Sequence: Synthetic polypeptide
EVQLVQSGAEVKKPGASVKVSCKASGYTFTGYYMHWVRQAPGQGLEWMGWINPKTGDTNYAQKFQGRVALSRDTSFNTAYMDLSSLRSDDTAVYYCAREGLSTSSPLDYWGQGTLVTVSS

SEQ ID NO: 1387 - DNA, 327 bp, Artificial Sequence
  Description of Artificial Sequence: Synthetic polynucleotide
cagcctgggctgactcagccaccctcagtgtcagtggccccaggacagtcggccaagattacctgtggagaaaacgaacttgcaacaaatattgtacactggtaccagcagaagccaggccaggcccctgtgctggtcatctatcatgataacgaccggccctcagggatccctgagcgattctctggctccaacgctgggaacacggccaccctgaccatcagcagggtcgaagccggggatgaggccgacttttactgtcagctgtgggatagtgctagtgatcaagtggtcttcggcggagggaccacgttgaccgtcctaggt

SEQ ID NO: 1388 - protein, 109 aa, Artificial Sequence
  Description of Artificial Sequence: Synthetic polypeptide
QPGLTQPPSVSVAPGQSAKITCGENELATNIVHWYQQKPGQAPVLVIYHDNDRPSGIPERFSGSNAGNTATLTISRVEAGDEADFYCQLWDSASDQVVFGGGTTLTVLG

SEQ ID NO: 1389 - DNA, 363 bp, Artificial Sequence
  Description of Artificial Sequence: Synthetic polynucleotide
gaggtgcagctggtgcagtcaggggctgaggtgaagaggcctggggcctcattgaaggtttcctgcaaggcatctggatacaccttcaccagccactatatacactgggtgcgacaggcccccggacaagggcttgagtggatgggatggatcaacactggcaatggtgacacaagatattcacagaggttccagggcagagtcaccgttaccagggacacatccgcgagcacagtctacatggaactgagcagcctgagatctgaagacacggccgtgtattactgtgcgagagagtctagcagcagctggtttgttgcttttgatgtctggggccaagggaccacggtcaccgtctcctca

SEQ ID NO: 1390 - protein, 121 aa, Artificial Sequence
  Description of Artificial Sequence: Synthetic polypeptide
EVQLVQSGAEVKRPGASLKVSCKASGYTFTSHYIHWVRQAPGQGLEWMGWINTGNGDTRYSQRFQGRVTVTRDTSASTVYMELSSLRSEDTAVYYCARESSSSWFVAFDVWGQGTTVTVSS

SEQ ID NO: 1391 - DNA, 327 bp, Artificial Sequence
  Description of Artificial Sequence: Synthetic polynucleotide
cagcctgtgctgactcagccaccctcggtgtcattggccccaggacagacggccaggattacctgttcggaaaagaacattcgaagtaaaagagtgcactggtaccagcagaagccaggccaggcccctgtcctggtcatgtattctgataacggccggcgctcagggatccctgaccgattttctggctccaactctgggaacacggccaccctgaccatcaccagggtcgaagccggtgatgagggcgacttttactgtcaggtgtgggatccgattactgatcaggtggttttcggcggagggaccaagctgaccgtcctaggt

SEQ ID NO: 1392 - protein, 109 aa, Artificial Sequence
  Description of Artificial Sequence: Synthetic polypeptide
QPVLTQPPSVSLAPGQTARITCSEKNIRSKRVHWYQQKPGQAPVLVMYSDNGRRSGIPDRFSGSNSGNTATLTITRVEAGDEGDFYCQVWDPITDQVVFGGGTKLTVLG

SEQ ID NO: 1393 - DNA, 372 bp, Artificial Sequence
  Description of Artificial Sequence: Synthetic polynucleotide
caggtgcagctggtgcagtctggggctgaggtgaagcagcctgggtcctcagtgaaggtctcctgtaaggcttctggatacaccttcaccggctactatatgcactgggtgcgacaggcccctggagaagggcttgagtggctgggatggatcaaccctcacagtggtggcacaaactatgcacagaagttccagggcagagtcacgattaccgcggacaaatccacgagcacagcctacatggagctgagcagcctgagatctgaggacacggctgtgtattactgtgcgagggagattgtggtggtgactgctccggctgctgcggctatggacgtctggggccaaggcaccctggtcaccgtctcctca

SEQ ID NO: 1394 - protein, 124 aa, Artificial Sequence
  Description of Artificial Sequence: Synthetic polypeptide
QVQLVQSGAEVKQPGSSVKVSCKASGYTFTGYYMHWVRQAPGEGLEWLGWINPHSGGTNYAQKFQGRVTITADKSTSTAYMELSSLRSEDTAVYYCAREIVVVTAPAAAAMDVWGQGTLVTVSS

SEQ ID NO: 1395 - DNA, 333 bp, Artificial Sequence
  Description of Artificial Sequence: Synthetic polynucleotide
cagtctgtgctgactcagccaccctccgcgtccgggtctcctggacagtcagtcaccatctcctgcactggaagcagcagtgacgttgctatttatgaccgtgtctcctggtaccagcagcccccaggcacagcccccaaactcattctttatgatgtccatgatcggccctcaggggtccctgatcgcttctctgggtccaagtctggcaacacggcctccctgaccatctctgggctccaggctgaggacgaggctgattattactgcagttcatacacaaccagcggcacttttgtcttcggaagtgggaccaaggtcaccgtcctaggt

SEQ ID NO: 1396 - protein, 111 aa, Artificial Sequence
  Description of Artificial Sequence: Synthetic polypeptide
QSVLTQPPSASGSPGQSVTISCTGSSSDVAIYDRVSWYQQPPGTAPKLILYDVHDRPSGVPDRFSGSKSGNTASLTISGLQAEDEADYYCSSYTTSGTFVFGSGTKVTVLG

SEQ ID NO: 1397 - DNA, 366 bp, Artificial Sequence
  Description of Artificial Sequence: Synthetic polynucleotide
gaggtgcagctggtgcagtctggggctgaggtgaagaagcctggggcctcagtgaacgtctcctgtaaggcttctggatacaccttcaccggctactatatgcactgggtgcgacaggcccctggacaagggcttgagtggatgggatggatcaaccccaacagtggtggcacaaactatgcacagaagtttcagggcagggtcaccgtgaccacagacacgtccaacagcacagcctacatggagctgaacaggctgaaatctgacgacacggccgtgtattattgtgcgagagaggggtccggggaccttgattccttatacatggacgtctggggcaaagggacaatggtcaccgtctcttca

SEQ ID NO: 1398 - DNA, 324 bp, Artificial Sequence
  Description of Artificial Sequence: Synthetic polynucleotide
tcctatgagctgactcagccaccctcggtgtcagtggccccaggacagacggccaggattacctgtggggcaaacaacattggaagtaaaagtgtgcactggtaccagcagaagccaggccaggcccctgtgctggtcgtctatgatgatagcgaccggccctcagggatccctgagcgattctctggctccaactctgggaacacggccaccctgaccatcaccagggtcgaagccggggatgaggccgactattactgtcagctatgggatggtgggagtgatgtggttttcggcggagggaccaagctgaccgtcctaggt

SEQ ID NO: 1399 - protein, 122 aa, Artificial Sequence
  Description of Artificial Sequence: Synthetic polypeptide
EVQLVQSGAEVKKPGASVNVSCKASGYTFTGYYMHWVRQAPGQGLEWMGWINPNSGGTNYAQKFQGRVTVTTDTSNSTAYMELNRLKSDDTAVYYCAREGSGDLDSLYMDVWGKGTMVTVSS

SEQ ID NO: 1400 - protein, 108 aa, Artificial Sequence
  Description of Artificial Sequence: Synthetic polypeptide
SYELTQPPSVSVAPGQTARITCGANNIGSKSVHWYQQKPGQAPVLVVYDDSDRPSGIPERFSGSNSGNTATLTITRVEAGDEADYYCQLWDGGSDVVFGGGTKLTVLG

SEQ ID NO: 1401 - DNA, 360 bp, Artificial Sequence; identical to SEQ ID NO: 1361
  Description of Artificial Sequence: Synthetic polynucleotide

SEQ ID NO: 1402 - protein, 120 aa, Artificial Sequence; identical to SEQ ID NO: 1362
  Description of Artificial Sequence: Synthetic polypeptide

SEQ ID NO: 1403 - DNA, 333 bp, Artificial Sequence; identical to SEQ ID NO: 1363
  Description of Artificial Sequence: Synthetic polynucleotide

SEQ ID NO: 1404 - protein, 111 aa, Artificial Sequence; identical to SEQ ID NO: 1364
  Description of Artificial Sequence: Synthetic polypeptide

SEQ ID NO: 1405 - protein, 8 aa, Artificial Sequence
  Description of Artificial Sequence: Synthetic peptide
GYTFTDHY

SEQ ID NO: 1406 - protein, 8 aa, Artificial Sequence
  Description of Artificial Sequence: Synthetic peptide
INPSSGGT

SEQ ID NO: 1407 - protein, 13 aa, Artificial Sequence
  Description of Artificial Sequence: Synthetic peptide
ARETIGGWNALDV

SEQ ID NO: 1408 - protein, 8 aa, Artificial Sequence
  Description of Artificial Sequence: Synthetic peptide
SSNIGINT

SEQ ID NO: 1409 - protein, 3 aa, Artificial Sequence
  Description of Artificial Sequence: Synthetic peptide
TNN

SEQ ID NO: 1410 - protein, 11 aa, Artificial Sequence
  Description of Artificial Sequence: Synthetic peptide
AAWDDTLNGPL

SEQ ID NO: 1411 - protein, 8 aa, Artificial Sequence
  Description of Artificial Sequence: Synthetic peptide
GYTFTGYY

SEQ ID NO: 1412 - protein, 8 aa, Artificial Sequence
  Description of Artificial Sequence: Synthetic peptide
INPNSGGT

SEQ ID NO: 1413 - protein, 12 aa, Artificial Sequence
  Description of Artificial Sequence: Synthetic peptide
AREGVHSDAFDV

SEQ ID NO: 1414 - protein, 6 aa, Artificial Sequence
  Description of Artificial Sequence: Synthetic peptide
QSVYTN

SEQ ID NO: 1415 - protein, 3 aa, Artificial Sequence
  Description of Artificial Sequence: Synthetic peptide
GAS

SEQ ID NO: 1416 - protein, 9 aa, Artificial Sequence
  Description of Artificial Sequence: Synthetic peptide
QQYGSSHFT

SEQ ID NO: 1417 - protein, 8 aa, Artificial Sequence
  Description of Artificial Sequence: Synthetic peptide
GYTFTDHY

SEQ ID NO: 1418 - protein, 8 aa, Artificial Sequence
  Description of Artificial Sequence: Synthetic peptide
INPSSGGT

SEQ ID NO: 1419 - protein, 13 aa, Artificial Sequence
  Description of Artificial Sequence: Synthetic peptide
ARETIGGWNALDV

SEQ ID NO: 1420 - protein, 8 aa, Artificial Sequence
  Description of Artificial Sequence: Synthetic peptide
SSTIGRHS

SEQ ID NO: 1421 - protein, 3 aa, Artificial Sequence
  Description of Artificial Sequence: Synthetic peptide
ANN

SEQ ID NO: 1422 - protein, 11 aa, Artificial Sequence
  Description of Artificial Sequence: Synthetic peptide
AAWDDSLSGVL

SEQ ID NO: 1423 - protein, 8 aa, Artificial Sequence
  Description of Artificial Sequence: Synthetic peptide
GYTFTDHY

SEQ ID NO: 1424 - protein, 7 aa, Artificial Sequence
  Description of Artificial Sequence: Synthetic peptide
INPSSGG

SEQ ID NO: 1425 - protein, 13 aa, Artificial Sequence
  Description of Artificial Sequence: Synthetic peptide
ARETIGGWNALDV

SEQ ID NO: 1426 - protein, 6 aa, Artificial Sequence
  Description of Artificial Sequence: Synthetic peptide
KIGTKS

SEQ ID NO: 1427 - protein, 3 aa, Artificial Sequence
  Description of Artificial Sequence: Synthetic peptide
DDR

SEQ ID NO: 1428 - protein, 11 aa, Artificial Sequence
  Description of Artificial Sequence: Synthetic peptide
QVWDSNSDHVV

SEQ ID NO: 1429 - protein, 8 aa, Artificial Sequence
  Description of Artificial Sequence: Synthetic peptide
GYTFTGYY

SEQ ID NO: 1430 - protein, 8 aa, Artificial Sequence
  Description of Artificial Sequence: Synthetic peptide
INPNSGGT

SEQ ID NO: 1431 - protein, 13 aa, Artificial Sequence
  Description of Artificial Sequence: Synthetic peptide
VREVKDYYYYMDV

SEQ ID NO: 1432 - protein, 8 aa, Artificial Sequence
  Description of Artificial Sequence: Synthetic peptide
SGSIASNS

SEQ ID NO: 1433 - protein, 3 aa, Artificial Sequence
  Description of Artificial Sequence: Synthetic peptide
DNK

SEQ ID NO: 1434 - protein, 10 aa, Artificial Sequence
  Description of Artificial Sequence: Synthetic peptide
QSYDDSEQVV

SEQ ID NO: 1435 - protein, 8 aa, Artificial Sequence
  Description of Artificial Sequence: Synthetic peptide
GYTFTGYY

SEQ ID NO: 1436 - protein, 8 aa, Artificial Sequence
  Description of Artificial Sequence: Synthetic peptide
VNPHSGGT

SEQ ID NO: 1437 - protein, 14 aa, Artificial Sequence
  Description of Artificial Sequence: Synthetic peptide
ARETDISANYHFDY

SEQ ID NO: 1438 - protein, 9 aa, Artificial Sequence
  Description of Artificial Sequence: Synthetic peptide
SSDVGSYNA

SEQ ID NO: 1439 - protein, 3 aa, Artificial Sequence
  Description of Artificial Sequence: Synthetic peptide
EVS

SEQ ID NO: 1440 - protein, 11 aa, Artificial Sequence
  Description of Artificial Sequence: Synthetic peptide
ATWDDSLKGPV

SEQ ID NO: 1441 - protein, 8 aa, Artificial Sequence
  Description of Artificial Sequence: Synthetic peptide
GYTFTGYY

SEQ ID NO: 1442 - protein, 8 aa, Artificial Sequence
  Description of Artificial Sequence: Synthetic peptide
INPKTGDT

SEQ ID NO: 1443 - protein, 13 aa, Artificial Sequence
  Description of Artificial Sequence: Synthetic peptide
AREGLSTSSPLDY

SEQ ID NO: 1444 - protein, 6 aa, Artificial Sequence
  Description of Artificial Sequence: Synthetic peptide
ELATNI

SEQ ID NO: 1445 - protein, 3 aa, Artificial Sequence
  Description of Artificial Sequence: Synthetic peptide
HDN

SEQ ID NO: 1446 - protein, 11 aa, Artificial Sequence
  Description of Artificial Sequence: Synthetic peptide
QLWDSASDQVV

SEQ ID NO: 1447 - protein, 8 aa, Artificial Sequence
  Description of Artificial Sequence: Synthetic peptide
GYTFTSHY

SEQ ID NO: 1448 - protein, 8 aa, Artificial Sequence
  Description of Artificial Sequence: Synthetic peptide
INTGNGDT

SEQ ID NO: 1449 - protein, 14 aa, Artificial Sequence
  Description of Artificial Sequence: Synthetic peptide
ARESSSSWFVAFDV

SEQ ID NO: 1450 - protein, 6 aa, Artificial Sequence
  Description of Artificial Sequence: Synthetic peptide
NIRSKR

SEQ ID NO: 1451 - protein, 3 aa, Artificial Sequence
  Description of Artificial Sequence: Synthetic peptide
SDN

SEQ ID NO: 1452 - protein, 11 aa, Artificial Sequence
  Description of Artificial Sequence: Synthetic peptide
QVWDPITDQVV

SEQ ID NO: 1453 - protein, 8 aa, Artificial Sequence
  Description of Artificial Sequence: Synthetic peptide
GYTFTGYY

SEQ ID NO: 1454 - protein, 8 aa, Artificial Sequence
  Description of Artificial Sequence: Synthetic peptide
INPHSGGT

SEQ ID NO: 1455 - protein, 17 aa, Artificial Sequence
  Description of Artificial Sequence: Synthetic peptide
AREIVVVTAPAAAAMDV

SEQ ID NO: 1456 - protein, 9 aa, Artificial Sequence
  Description of Artificial Sequence: Synthetic peptide
SSDVAIYDR

SEQ ID NO: 1457 - protein, 3 aa, Artificial Sequence
  Description of Artificial Sequence: Synthetic peptide
DVH

SEQ ID NO: 1458 - protein, 10 aa, Artificial Sequence
  Description of Artificial Sequence: Synthetic peptide
SSYTTSGTFV

SEQ ID NO: 1459 - protein, 8 aa, Artificial Sequence
  Description of Artificial Sequence: Synthetic peptide
GYTFTGYY

SEQ ID NO: 1460 - protein, 8 aa, Artificial Sequence
  Description of Artificial Sequence: Synthetic peptide
INPNSGGT

SEQ ID NO: 1461 - protein, 15 aa, Artificial Sequence
  Description of Artificial Sequence: Synthetic peptide
AREGSGDLDSLYMDV

SEQ ID NO: 1462 - protein, 6 aa, Artificial Sequence
  Description of Artificial Sequence: Synthetic peptide
NIGSKS

SEQ ID NO: 1463 - protein, 3 aa, Artificial Sequence
  Description of Artificial Sequence: Synthetic peptide
DDS

SEQ ID NO: 1464 - protein, 10 aa, Artificial Sequence
  Description of Artificial Sequence: Synthetic peptide
QLWDGGSDVV

SEQ ID NO: 1465 - protein, 8 aa, Artificial Sequence
  Description of Artificial Sequence: Synthetic peptide
GYTFTDHY

SEQ ID NO: 1466 - protein, 8 aa, Artificial Sequence
  Description of Artificial Sequence: Synthetic peptide
INPSSGGT

SEQ ID NO: 1467 - protein, 13 aa, Artificial Sequence
  Description of Artificial Sequence: Synthetic peptide
ARETIGGWNALDV

SEQ ID NO: 1468 - protein, 8 aa, Artificial Sequence
  Description of Artificial Sequence: Synthetic peptide
SSNIGINT

SEQ ID NO: 1469 - protein, 3 aa, Artificial Sequence
  Description of Artificial Sequence: Synthetic peptide
TNN

SEQ ID NO: 1470 - protein, 11 aa, Artificial Sequence
  Description of Artificial Sequence: Synthetic peptide
AAWDDTLNGPL

SEQ ID NO: 1471 - DNA, 390 bp, Artificial Sequence
  Description of Artificial Sequence: Synthetic polynucleotide
caggtgcagctgttggagtctgggggaggcgtggtccagcctgggaggtccctgagactctcctgtgcagcctctggattcaccttcagtaactatggcatgcactgggtccgccaggctccaggcaaggggctggagtgggtggcaattatatcatttgatggaagtaaaaaatattatgcaaactccgtgaagggccgatccaccatctccagagacaattccaagaacacgctgtctctgcaaatgaacagcctgggacctgaggacacggctctatattactgtgcgaaactgccctccccgtattactttgatagtcggttcgtgtgggtcgccgccagcgcatttcacttctggggccagggaatcctggtcaccgtctcttca

SEQ ID NO: 1472 - protein, 130 aa, Artificial Sequence
  Description of Artificial Sequence: Synthetic polypeptide
QVQLLESGGGVVQPGRSLRLSCAASGFTFSNYGMHWVRQAPGKGLEWVAIISFDGSKKYYANSVKGRSTISRDNSKNTLSLQMNSLGPEDTALYYCAKLPSPYYFDSRFVWVAASAFHFWGQGILVTVSS

SEQ ID NO: 1473 - protein, 110 aa, Artificial Sequence
  Description of Artificial Sequence: Synthetic polypeptide
NFMLTQPPSASGTPGQRVTISCSGSSSNIGGNTVHWFQQLPGTAPKLLIYTNSLRPSGVPDRFSGSKSGTSASLAISGLQSEDEADYYCAAWDDSLNGQVFGGGTKLTVL

SEQ ID NO: 1474 - DNA, 330 bp, Artificial Sequence
  Description of Artificial Sequence: Synthetic polynucleotide
aattttatgctgactcagccaccctcagcgtctgggacccccgggcagagggtcaccatctcttgctctggaagcagctccaacatcggaggtaatactgtacactggttccagcagctcccaggaacggcccccaaactcctcatctatactaatagtctgcggccctcaggggtccctgaccgattctctggctccaagtctggcacctcagcctccctggccatcagtgggctccagtctgaggatgaggctgattattactgtgcagcatgggataacagcctaaatggtcaggtgttcggcggagggaccaagctgaccgtccta

SEQ ID NO: 1475 - protein, 110 aa, Artificial Sequence
  Description of Artificial Sequence: Synthetic polypeptide
NFMLTQPPSASGTPGQRVTISCSGSSSNIGGNTVHWFQQLPGTAPKLLIYTNSLRPSGVPDRFSGSKSGTSASLAISGLQSEDEADYYCAAWDNSLNGQVFGGGTKLTVL

SEQ ID NO: 1476 - protein, 8 aa, Artificial Sequence
  Description of Artificial Sequence: Synthetic peptide
GFTFSNYG

SEQ ID NO: 1477 - protein, 8 aa, Artificial Sequence
  Description of Artificial Sequence: Synthetic peptide
ISFDGSKK

SEQ ID NO: 1478 - protein, 25 aa, Artificial Sequence
  Description of Artificial Sequence: Synthetic peptide
CAKLPSPYYFDSRFVWVAASAFHFW

SEQ ID NO: 1479 - protein, 8 aa, Artificial Sequence
  Description of Artificial Sequence: Synthetic peptide
SSNIGGNT

SEQ ID NO: 1480 - protein, 3 aa, Artificial Sequence
  Description of Artificial Sequence: Synthetic peptide
TNS

SEQ ID NO: 1481 - protein, 13 aa, Artificial Sequence [sequence omitted]

SEQ ID NO: 1482 - protein, 13 aa, Artificial Sequence
  Description of Artificial Sequence: Synthetic peptide
CAAWDNSLNGQVF

SEQ ID NO: 1483 - protein, 7 aa, Artificial Sequence
  Description of Artificial Sequence: Synthetic peptide
GNTNRPS

SEQ ID NO: 1484 - protein, 5 aa, Artificial Sequence
  Description of Artificial Sequence: Synthetic peptide
GGGGS

SEQ ID NO: 1485 - DNA, 372 bp, Artificial Sequence
  Description of Artificial Sequence: Synthetic variable heavy chain of Ab-14
caggtgcagctggtgcagtctggagctgaggtgaagaagcctggggcctcagtgaaggtctcctgcaaggcttctggttacacctttaccagctatggtatcagctgggtgcgacaggcccctggacaagggcttgagtggatgggatggatcagcgcttacaatggtaacacaaactatgcacagaagctccagggcagagtcaccatgaccacagacacatccacgagcacagcctacatggagctgaggagcctgagatctgacgacacggccgtgtattactgtgcgagagctctacctagtgggactatactggtcggaggttggttcgacccctggggccagggaaccctggtcaccgtctcctca

SEQ ID NO: 1486 - protein, 124 aa, Artificial Sequence
  Description of Artificial Sequence: Synthetic variable heavy chain of Ab-14
QVQLVQSGAEVKKPGASVKVSCKASGYTFTSYGISWVRQAPGQGLEWMGWISAYNGNTNYAQKLQGRVTMTTDTSTSTAYMELRSLRSDDTAVYYCARALPSGTILVGGWFDPWGQGTLVTVSS

SEQ ID NO: 1487 - DNA, 333 bp, Artificial Sequence
  Description of Artificial Sequence: Synthetic variable light chain of Ab-14
aattttatgctgactcagccccactctgtgtcggagtctccggggaagacggtaaccatctcctgcacccgcagcagtggcaacattgccagcaattatgtgcagtggtaccaacagcgcccgggcagtgcccccaccactgtgatctatgaggataaccaaagaccctctggggtccctgatcggttctctggctccatcgacagctcctccaactctgcctccctcaccatctctggactgaagactgaggacgaggctgactactactgtcagtcttatgatagcagcaatctttgggtgttcggcggagggaccaagctgaccgtccta

SEQ ID NO: 1488 - protein, 111 aa, Artificial Sequence
  Description of Artificial Sequence: Synthetic variable light chain of Ab-14
NFMLTQPHSVSESPGKTVTISCTRSSGNIASNYVQWYQQRPGSAPTTVIYEDNQRPSGVPDRFSGSIDSSSNSASLTISGLKTEDEADYYCQSYDSSNLWVFGGGTKLTVL

SEQ ID NO: 1489 - DNA, 372 bp, Artificial Sequence
  Description of Artificial Sequence: Synthetic variable heavy chain of Ab-16
gaggtgcagctggtgcagtctgggggaggcgtggtccagcctgggaggtccctgagactctcctgtgcagcctctggattcacctttagcagctatgccctgagctgggtccgccaggctccagggaaggggctggagtgggtctcagctattagtggtggtggtggtagcacatactacgcagactccgtgaagggccggttcaccatctccagagacaattccaagaacacgctgtatctgcaaatgaacagcctgagagccgaggacacggccgtatattactgtgcgaaagacgtgtttccagagactttttcgatgaactacggtatggacgtctggggccaaggaaccctggtcaccgtctcctca

SEQ ID NO: 1490 - protein, 124 aa, Artificial Sequence
  Description of Artificial Sequence: Synthetic variable heavy chain Ab-16
EVQLVQSGGGVVQPGRSLRLSCAASGFTFSSYALSWVRQAPGKGLEWVSAISGGGGSTYYADSVKGRFTISRDNSKNTLYLQMNSLRAEDTAVYYCAKDVFPETFSMNYGMDVWGQGTLVTVSS

SEQ ID NO: 1491 - DNA, 324 bp, Artificial Sequence
  Description of Artificial Sequence: Synthetic variable light chain of Ab-16
tcttctgagctgactcaggaccctgctgtgtctgtggccttgggacagacagtcaggatcacatgccaaggagacagcctcagaagctattatgcaagctggtaccagcagaagccaggacaggcccctgtacttgtcatctatggtaaaaacaaccggccctcagggatcccagaccgattctctggctccagctcaggaaacacagcttccttgaccatcactggggctcaggcggaagatgaggctgactattactgtaactcccgggacagcagtggtaaccattatgtcttcggaactgggaccaaggtcaccgtccta

SEQ ID NO: 1492 - protein, 108 aa, Artificial Sequence
  Description of Artificial Sequence: Synthetic variable light chain of Ab-16
SSELTQDPAVSVALGQTVRITCQGDSLRSYYASWYQQKPGQAPVLVIYGKNNRPSGIPDRFSGSSSGNTASLTITGAQAEDEADYYCNSRDSSGNHYVFGTGTKVTVL

SEQ ID NO: 1493 - DNA, 384 bp, Artificial Sequence
  Description of Artificial Sequence: Synthetic variable heavy chain of Ab-22
caggtgcagctggtgcagtctgggggaggcgtggtacagcctggggggtccctgagactctcctgtgcagcctctggattcacctttgatgattatgccatgcactgggtccgtcaagctccagggaagggtctggagtgggtctctcttattagtggggatggtggtagcacatactatgcagactctgtgaagggccgattcaccatctccagagacaacagcaaaaactccctgtatctgcaaatgaacagtctgagaactgaggacaccgccttgtattactgtgcaaaagtgctcctcccctgtagtagtaccagctgctatggaagcgtcggtgcttttgatatctggggccaagggaccacggtcaccgtctcctca

SEQ ID NO: 1494 - protein, 128 aa, Artificial Sequence
  Description of Artificial Sequence: Synthetic variable heavy chain of Ab-22
QVQLVQSGGGVVQPGGSLRLSCAASGFTFDDYAMHWVRQAPGKGLEWVSLISGDGGSTYYADSVKGRFTISRDNSKNSLYLQMNSLRTEDTALYYCAKVLLPCSSTSCYGSVGAFDIWGQGTTVTVSS

SEQ ID NO: 1495 - DNA, 324 bp, Artificial Sequence
  Description of Artificial Sequence: Synthetic variable light chain Ab-22
taggacgatgagctcggtcccagctccgaagacataatgatcactattattatcccacacctgacagtaataatcggcctcatcaccggcttcgaccctgctgatggtcagggtggccgtgttcccagagttggagccagagaatcgctcagagatccctgagggccggtccctatcagagtagatgaccaacgcaggggcctggcctggcttctgctggtaccagtgcacactcttccttccaatgtcgcttcccccacaggtaatcctggccgtctttcctggggccactgacactgagggtgcctgagtcagcacaggcag

SEQ ID NO: 1496 - protein, 108 aa, Artificial Sequence
  Description of Artificial Sequence: Synthetic variable light chain of Ab-22
LPVLTQAPSVSVAPGKTARITCGGSDIGRKSVHWYQQKPGQAPALVIYSDRDRPSGISERFSGSNSGNTATLTISRVEAGDEADYYCQVWDNNSDHYVFGAGTELIVL

SEQ ID NO: 1497 - DNA, 351 bp, Artificial Sequence
  Description of Artificial Sequence: Synthetic variable heavy chain of Ab-30
caggtgcagctggtgcagtctgggggaagtgtggtacggcctggggaatccctcagactctcctgtgtagcctctggattcatctttgataattatgacatgagttgggtccgccaagttccagggaaggggctggagtgggtctctcgtgttaattggaatggtggtagcacaacttatgcagacgctgtgaagggccgattcaccatctccagagacaacaccaagaactccctgtatctacaaatgaacaacctgagagccgaagacacggccgtgtattactgtgtgcgcgagtttgtcggtgcttatgatctctggggccaggggaccacggtcaccgtctcctca

SEQ ID NO: 1498 - protein, 117 aa, Artificial Sequence
  Description of Artificial Sequence: Synthetic variable heavy chain of Ab-30
QVQLVQSGGSVVRPGESLRLSCVASGFIFDNYDMSWVRQVPGKGLEWVSRVNWNGGSTTYADAVKGRFTISRDNTKNSLYLQMNNLRAEDTAVYYCVREFVGAYDLWGQGTTVTVSS

SEQ ID NO: 1499 - DNA, 327 bp, Artificial Sequence
  Description of Artificial Sequence: Synthetic variable light chain of Ab-30
cagtctgccctgactcagcctgcctccgtgtctgggtctcctggacagtcgatcaccatctcctgcactggaaccagcagtgacgttggtggttataactatgtctcctggtaccaacaacacccaggcaaagcccccaaactcatgatttatgatgtcagtaatcggccctcaggggtttctaatcgcttctctggctccaagtctggcaacacggcctccctgaccatctctgggctccaggctgaggacgaggctgattattactgcagctcatatacaagcagcactctgccgttcggcggagggaccaagctgaccgtccta

SEQ ID NO: 1500 - protein, 109 aa, Artificial Sequence
  Description of Artificial Sequence: Synthetic variable light chain of Ab-30
QSALTQPASVSGSPGQSITISCTGTSSDVGGYNYVSWYQQHPGKAPKLMIYDVSNRPSGVSNRFSGSKSGNTASLTISGLQAEDEADYYCSSYTSSTLPFGGGTKLTVL

SEQ ID NO: 1501 - DNA, 363 bp, Artificial Sequence
  Description of Artificial Sequence: Synthetic variable heavy chain of Ab-31
caggtgcagctggtgcagtctggggctgaggtgaagaagccaggggccacagtgaaggtctcctgcaaggtttttggagacaccttccgcggcctctatatacactgggtgcgacaggcccctggacaagggcttgagtggatgggagggatcatccctatctttggtacagcaaactacgcacagaagttccagggcagagtcacgattaccacggacgaatccacgagcacagcctacatggagctgagcagcctgagatctgaggacacggccgtgtattactgtgcgagcggactacgttgggggatctggggctggttcgacccctggggccagggcaccctggtcaccgtctcctca

SEQ ID NO: 1502 - protein, 121 aa, Artificial Sequence
  Description of Artificial Sequence: Synthetic variable heavy chain of Ab-31
QVQLVQSGAEVKKPGATVKVSCKVFGDTFRGLYIHWVRQAPGQGLEWMGGIIPIFGTANYAQKFQGRVTITTDESTSTAYMELSSLRSEDTAVYYCASGLRWGIWGWFDPWGQGTLVTVSS

SEQ ID NO: 1503 - DNA, 321 bp, Artificial Sequence
  Description of Artificial Sequence: Synthetic variable light chain of Ab-31
gaaattgtgttgacgcagtctccagccaccctgtctttgtctccaggggaaagagccaccctctcctgcagggccagtcagagtattggcaacagcttagcctggtaccagcagaaacctggccaggctcccaggctcctcatgtatggtgcatccagcagggccactggcatcccagacaggttcagtggcagtggggctgggacagacttcactctcaccatcagcagcctagagcctgaagattttgcaacgtattactgtcagcagcatactatcccaacattctctttcggccctgggaccaaagtggaagtcaaa

SEQ ID NO: 1504 - protein, 107 aa, Artificial Sequence
  Description of Artificial Sequence: Synthetic variable light chain of Ab-31
EIVLTQSPATLSLSPGERATLSCRASQSIGNSLAWYQQKPGQAPRLLMYGASSRATGIPDRFSGSGAGTDFTLTISSLEPEDFATYYCQQHTIPTFSFGPGTKVEVK

SEQ ID NO: 1505 - DNA, 363 bp, Artificial Sequence
  Description of Artificial Sequence: Synthetic variable heavy chain of Ab-32
gaggtgcagctggtgcagtctggggctgagctgaagaagcctgggtcctcggtgaaggtctcctgcaaggcttttggaggcaccttcagtgacaatgctatcagctgggtgcgacaggcccctggacaagggcctgagtggatggggggcatcattcctatctttggaaaaccaaactacgcacagaagttccagggcagagtcacgattaccgcggacgaatccacgagcactgcctacatggtcctgagcagcctgagatctgaggacacggccgtatattactgtgcgagaactatggttcggggctttcttggggttatggacgtctggggccaagggaccacggtcaccgtctcctca

SEQ ID NO: 1506 - protein, 121 aa, Artificial Sequence
  Description of Artificial Sequence: Synthetic variable heavy chain of Ab-32
EVQLVQSGAELKKPGSSVKVSCKAFGGTFSDNAISWVRQAPGQGPEWMGGIIPIFGKPNYAQKFQGRVTITADESTSTAYMVLSSLRSEDTAVYYCARTMVRGFLGVMDVWGQGTTVTVSS

SEQ ID NO: 1507 - DNA, 321 bp, Artificial Sequence
  Description of Artificial Sequence: Synthetic variable light chain of Ab-32
gatattgtgatgacccagactccatccttcctgtccgcatccataggagacagagtcaccatcacttgccgggccagtcagggcattggcagttatttagcctggtatcagcaaagaccaggggaagcccctaagctcctgatctatgctgcatcgactttgcaaagtggagtcccatcaaggttcagcggcagtggatctgggacggacttcactctcacaatcagcaacctgcagcctgaagattttgcaacttattactgtcaacagcttaataattacccgatcaccttcggccaagggacacgactggagattaaa

SEQ ID NO: 1508 - protein, 107 aa, Artificial Sequence
  Description of Artificial Sequence: Synthetic variable light chain of Ab-32
DIVMTQTPSFLSASIGDRVTITCRASQGIGSYLAWYQQRPGEAPKLLIYAASTLQSGVPSRFSGSGSGTDFTLTISNLQPEDFATYYCQQLNNYPITFGQGTRLEIK

SEQ ID NO: 1509 - DNA, 375 bp, Artificial Sequence
  Description of Artificial Sequence: Synthetic variable heavy chain of Ab-38
caggtgcagctggtgcagtctgggggaggcttggtacagcctggggggtccctgagactctcctgtgcagcctctggattcacctttagcagctatgccatgagctgggtccgccaggctccagggaaggggctggagtgggtctcagctattagtggtagtggtggtagcacatactacgcagactccgtgaagggccggttcaccatctccagagacaattccaagaacacgctgtatctgcaaatgaacagcctgagagccgaggacacggccgtatattactgtgcgaaagatcagttcgttacgatttttggagtgccaagatacggtatggacgtctggggccaagggaccacggtcaccgtctcctca

SEQ ID NO: 1510 - protein, 125 aa, Artificial Sequence
  Description of Artificial Sequence: Synthetic variable heavy chain of Ab-38
QVQLVQSGGGLVQPGGSLRLSCAASGFTFSSYAMSWVRQAPGKGLEWVSAISGSGGSTYYADSVKGRFTISRDNSKNTLYLQMNSLRAEDTAVYYCAKDQFVTIFGVPRYGMDVWGQGTTVTVSS

SEQ ID NO: 1511 - DNA, 315 bp, Artificial Sequence
  Description of Artificial Sequence: Synthetic variable light chain of Ab-38
cagtctgccctgactcagccaccctcagtgtccgtgtccccaggacagacagccaacatcccctgctctggagataaattggggaataaatatgcttactggtatcagcagaagccaggccagtcccctgtactgctcatctatcaagatatcaagcggccctcaaggatccctgagcgattctctggctccaactctgcggacacagccactctgaccatcagcgggacccaggctatggatgaggctgactattactgtcagacgtgggacaacagcgtggtcttcggcggcgggaccaagctgaccgtcctc

SEQ ID NO: 1512 - protein, 105 aa, Artificial Sequence
  Description of Artificial Sequence: Synthetic variable light chain of Ab-38
QSALTQPPSVSVSPGQTANIPCSGDKLGNKYAYWYQQKPGQSPVLLIYQDIKRPSRIPERFSGSNSADTATLTISGTQAMDEADYYCQTWDNSVVFGGGTKLTVL

SEQ ID NO: 1513 - DNA, 360 bp, Artificial Sequence
  Description of Artificial Sequence: Synthetic variable heavy chain of Ab-42
caggtgcagctggtgcagtctggggctgaggtgaagaagcctgggtcctcggtgaaggtctcctgcaaggcttctggaggcaccttcagcagctatgctatcagctgggtgcgacaggcccctggacaagggcttgagtggatgggagggatcatccctatctttggtacagcaaactacgcacagaagttccagggcagagtcacgattaccgcggacaaatccacgagcacagcctacatggagctgagcagcctgagatctgaggacacggccgtctattactgtgcgagagggcgtcaaatgttcggtgcgggaattgatttctggggcccgggcaccctggtcaccgtctcctca

SEQ ID NO: 1514 - protein, 120 aa, Artificial Sequence
  Description of Artificial Sequence: Synthetic variable heavy chain of Ab-42
QVQLVQSGAEVKKPGSSVKVSCKASGGTFSSYAISWVRQAPGQGLEWMGGIIPIFGTANYAQKFQGRVTITADKSTSTAYMELSSLRSEDTAVYYCARGRQMFGAGIDFWGPGTLVTVSS

SEQ ID NO: 1515 - DNA, 336 bp, Artificial Sequence
  Description of Artificial Sequence: Synthetic variable light chain of Ab-42
aattttatgctgactcagccccactctgtgtcggagtctccggggaagacggtaaccatctcctgcacccgcagcagtggcagcattgacagcaactatgtgcagtggtaccagcagcgcccgggcagcgcccccaccactgtgatctatgaggataaccaaagaccctctggggtccctgatcggttctctggctccatcgacagctcctccaactctgcctccctcaccatctctggactgaagactgaggacgaggctgactactactgtcagtcttatgatagcaacaatcgtcatgtgatattcggcggagggaccaagctgaccgtccta

SEQ ID NO: 1516 - protein, 112 aa, Artificial Sequence
  Description of Artificial Sequence: Synthetic variable light chain of Ab-42
NFMLTQPHSVSESPGKTVTISCTRSSGSIDSNYVQWYQQRPGSAPTTVIYEDNQRPSGVPDRFSGSIDSSSNSASLTISGLKTEDEADYYCQSYDSNNRHVIFGGGTKLTVL

SEQ ID NO: 1517 - DNA, 354 bp, Artificial Sequence
  Description of Artificial Sequence: Synthetic variable heavy chain of Ab-46
gaggtgcagctggtggagtctggggctgaagtaaagaagcctgggtcctcggtgaaagtctcctgcaaggtttcaggaggcacattcggcacctatgctctcaactgggtgcgccaggcccctggacaagggcttgagtggatgggaaggatcgtccctctcattggtctagtaaactacgcacataactttgagggcagaatctcgattaccgcggacaagtccacgggcacagcctacatggaactgagcaacctgagatctgacgacacggccgtgtattactgtgcgagagaggtctacggtggtaactccgactactggggccagggaaccctggtcaccgtctcctca

SEQ ID NO: 1518 - protein, 118 aa, Artificial Sequence
  Description of Artificial Sequence: Synthetic variable heavy chain of Ab-46
EVQLVESGAEVKKPGSSVKVSCKVSGGTFGTYALNWVRQAPGQGLEWMGRIVPLIGLVNYAHNFEGRISITADKSTGTAYMELSNLRSDDTAVYYCAREVYGGNSDYWGQGTLVTVSS

SEQ ID NO: 1519 - DNA, 330 bp, Artificial Sequence
  Description of Artificial Sequence: Synthetic variable light chain of Ab-46
aattttatgctgactcagccccactcagtgtcggagtctccggggaagacggtaaccatctcctgcactcgcagtagtggcaacattggcaccaactatgtgcagtggtaccagcagcgcccgggcagtgcccccgtcgctttgatctacgaggattatcgaagaccctctggggtccctgatcggttctctggctccatcgacagctcctccaactctgcctccctcatcatctctggactgaagcctgaggacgaggctgactactactgtcagtcttatcatagcagcggttgggaattcggcggagggaccaagctgaccgtcctc

SEQ ID NO: 1520 - protein, 110 aa, Artificial Sequence
  Description of Artificial Sequence: Synthetic variable light chain of Ab-46
NFMLTQPHSVSESPGKTVTISCTRSSGNIGTNYVQWYQQRPGSAPVALIYEDYRRPSGVPDRFSGSIDSSSNSASLIISGLKPEDEADYYCQSYHSSGWEFGGGTKLTVL

SEQ ID NO: 1521 - DNA, 360 bp, Artificial Sequence
  Description of Artificial Sequence: Synthetic variable heavy chain of Ab-50
caggtgcagctggtgcagtctggaggtgaggtgaagaagccgggggcctcagtgaaggtctcctgcaaggcttctggttacaccttgagcagtcatggtataacctgggtgcgacaggcccctggacaagggcttgagtggatgggatggatcagcgctcacaatggtcacgctagcaatgcacagaaggtggaggacagagtcactatgactactgacacatccacgaacacagcctacatggaactgaggagcctgacagctgacgacacggccgtgtattactgtgcgagagtacatgctgccctctactatggtatggacgtctggggccaaggaaccctggtcaccgtctcctca

SEQ ID NO: 1522 - protein, 120 aa, Artificial Sequence
  Description of Artificial Sequence: Synthetic variable heavy chain of Ab-50
QVQLVQSGGEVKKPGASVKVSCKASGYTLSSHGITWVRQAPGQGLEWMGWISAHNGHASNAQKVEDRVTMTTDTSTNTAYMELRSLTADDTAVYYCARVHAALYYGMDVWGQGTLVTVSS

SEQ ID NO: 1523 - DNA, 324 bp, Artificial Sequence
  Description of Artificial Sequence: Synthetic variable light chain of Ab-50
cagtctgtgctgactcagccaccctcggtgtcagtggccccaggacagacggccaggattacctgtgggggaaacaacattggaagtaaaggtgtgcactggtatcagcagaagccaggccaggcccctgtactggtcgtctatgatgatagtgaccggccctcagggatccctgagcgattctctggctccaactctgggaacacggccaccctgaccatcagcagggtcgaagccggggatgaggccgactattactgtcaggtgtgggatagtagtagtgatcattgggtgttcggcggagggaccaagctgaccgtccta

SEQ ID NO: 1524 - protein, 108 aa, Artificial Sequence
  Description of Artificial Sequence: Synthetic variable light chain of Ab-50
QSVLTQPPSVSVAPGQTARITCGGNNIGSKGVHWYQQKPGQAPVLVVYDDSDRPSGIPERFSGSNSGNTATLTISRVEAGDEADYYCQVWDSSSDHWVFGGGTKLTVL

SEQ ID NO: 1525 - DNA, 363 bp, Artificial Sequence
  Description of Artificial Sequence: Synthetic variable heavy chain of Ab-52
caggtgcagctgcaggagtcggggggaggcgtggtgcagcctgggaggtccctgagactctcctgttcagcctctggattcaccttcagcagacatggcatgcactgggtccgccaggctccaggcaaggggctggagtgggtggcagtgatatcacatgatggaagtgtaaaatactatgcagactccatgaagggccgattcagcatctccagagacaattccaacaacacactgtatctccaaatggacagcctgagagctgacgacacggccgtttattactgtgcgagaggactgtcgtaccaggtgtcggggtggttcgacccctggggccagggcaccctggtcaccgtctcctca

SEQ ID NO: 1526 - protein, 121 aa, Artificial Sequence
  Description of Artificial Sequence: Synthetic variable heavy chain of Ab-52
QVQLQESGGGVVQPGRSLRLSCSASGFTFSRHGMHWVRQAPGKGLEWVAVISHDGSVKYYADSMKGRFSISRDNSNNTLYLQMDSLRADDTAVYYCARGLSYQVSGWFDPWGQGTLVTVSS

SEQ ID NO: 1527 - DNA, 333 bp, Artificial Sequence
  Description of Artificial Sequence: Synthetic variable light chain of Ab-52
aattttatgctgactcagccccactctgtgtcggagtctccggggaagacggtaaccatctcctgcacccgcagcagtggcagcattgccagcaactatgtgcagtggtaccagcagcgcccgggcagtgcccccaccactgtgatctatgaggataaccaaagaccctctggggtccctgatcggttctctggctccatcgacagctcctccaactctgcctccctcaccatctctggactgaagactgaggacgaggctgactactactgtcagtcttatgatagcaccaccccttcggtgttcggcggcgggaccaagctgaccgtccta

SEQ ID NO: 1528 - protein, 111 aa, Artificial Sequence
  Description of Artificial Sequence: Synthetic variable light chain of Ab-52
NFMLTQPHSVSESPGKTVTISCTRSSGSIASNYVQWYQQRPGSAPTTVIYEDNQRPSGVPDRFSGSIDSSSNSASLTISGLKTEDEADYYCQSYDSTTPSVFGGGTKLTVL

SEQ ID NO: 1529 - DNA, 360 bp, Artificial Sequence
  Description of Artificial Sequence: Synthetic variable heavy chain of Ab-55
caggtgcagctggtgcagtctggagctgaggtgaagaagcctggggcctcagtgaaggtctcctgcaaggcttctggttacacctttaccagctatggtatcagctgggtgcgacaggcccctggacaagggcttgagtggatgggatggaccagccctcataatggtctcacagcatttgcacagatcctagagggccgagtcaccatgaccacagacacatccacgaacacagcctacatggaattgaggaacctgacatttgatgacacggccgtttatttctgtgcgaaagtacatcctgtcttctcttatgcgttggacgtctggggccaaggcaccctggtcaccgtctcctca

SEQ ID NO: 1530 - protein, 120 aa, Artificial Sequence
  Description of Artificial Sequence: Synthetic variable heavy chain of Ab-55
QVQLVQSGAEVKKPGASVKVSCKASGYTFTSYGISWVRQAPGQGLEWMGWTSPHNGLTAFAQILEGRVTMTTDTSTNTAYMELRNLTFDDTAVYFCAKVHPVFSYALDVWGQGTLVTVSS

SEQ ID NO: 1531 - DNA, 330 bp, Artificial Sequence
  Description of Artificial Sequence: Synthetic variable light chain of Ab-55
aattttatgctgactcagccccactctgtgtcggagtccccggggaagacggtaaccatctcctgcacccgcagcagtggcagcattgccagcaactatgtacagtggtaccagcagcgcccgggcagttcccccaccactgtgatctatgaagataaccaaagaccctctggggtccctgatcggttctctggctccatcgacacctcctccaactctgcctccctcaccatctctggactgaagactaaggacgaggcggactactactgtcagtcttatgatggcatcactgtgattttcggcggagggaccaagttgaccgtccta

SEQ ID NO: 1532 - protein, 110 aa, Artificial Sequence
  Description of Artificial Sequence: Synthetic variable light chain of Ab-55
NFMLTQPHSVSESPGKTVTISCTRSSGSIASNYVQWYQQRPGSSPTTVIYEDNQRPSGVPDRFSGSIDTSSNSASLTISGLKTKDEADYYCQSYDGITVIFGGGTKLTVL

SEQ ID NO: 1533 - DNA, 354 bp, Artificial Sequence
  Description of Artificial Sequence: Synthetic variable heavy chain of Ab-56
gaggtgcagctggtggagtctggagctgaggtgatgaaccctgggtcctcggtgagggtctcctgcaggggttctggaggcgacttcagtacctatgctttcagctgggtgcgacaggcccctggacaagggcttgagtggatgggaaggatcatccctatccttggtatagcaaactacgcacagaagttccagggcagggtcacgattaccgcggacaaatccacgagcacagcctacatggagctgagcagcctgagatctgacgatacggccgtgtattactgtgcgagagatggctatggttcggacccggtgctatggggccagggcaccctggtcaccgtctcctca

SEQ ID NO: 1534 - protein, 118 aa, Artificial Sequence
  Description of Artificial Sequence: Synthetic variable heavy chain of Ab-56
EVQLVESGAEVMNPGSSVRVSCRGSGGDFSTYAFSWVRQAPGQGLEWMGRIIPILGIANYAQKFQGRVTITADKSTSTAYMELSSLRSDDTAVYYCARDGYGSDPVLWGQGTLVTVSS

SEQ ID NO: 1535 - DNA, 333 bp, Artificial Sequence
  Description of Artificial Sequence: Synthetic variable light chain of Ab-56
aattttatgctgactcagccccactctgtgtcggggtctccggggaagacggtaaccctcccctgcacccgcagcagtggcagcattgccagccactatgtccagtggtaccagcagcgcccgggcagtgcccccaccactgtgatctatgaggataacaagagaccctctggggtccctgatcggttctctggctccatcgacagctcctccaactctgcctccctcagcatctctggactgaagactgaggacgaggctgactactactgtcagtcttatgatagcagcaatcgttgggtgttcggcggagggaccaagctgaccgtccta

SEQ ID NO: 1536 - protein, 111 aa, Artificial Sequence
  Description of Artificial Sequence: Synthetic variable light chain of Ab-56
NFMLTQPHSVSGSPGKTVTLPCTRSSGSIASHYVQWYQQRPGSAPTTVIYEDNKRPSGVPDRFSGSIDSSSNSASLSISGLKTEDEADYYCQSYDSSNRWVFGGGTKLTVL

SEQ ID NO: 1537 - DNA, 354 bp, Artificial Sequence
  Description of Artificial Sequence: Synthetic variable heavy chain of Ab-65
gaggtgcagctggtgcagtctggagctgaggtgaagaagcctggggcctcagtgaaggtctcctgcaaggcttctggttacacctttaccaactatggtatcagctgggtgcgacaggcccctggacaagggcttgagtggatgggatggatcagcgcttacaatggtaacacaaactatgcacagaaggtccagggcagagtcaccatgaccacagacacatccacgagcacaggctacatggagctgaggagcctgagatctgacgacacggccgtgtattactgtgcgagaggagattttcggaaaccctttgactactggggccagggaaccctggtcaccgtctcctca

SEQ ID NO: 1538 - protein, 118 aa, Artificial Sequence
  Description of Artificial Sequence: Synthetic variable heavy chain of Ab-65
EVQLVQSGAEVKKPGASVKVSCKASGYTFTNYGISWVRQAPGQGLEWMGWISAYNGNTNYAQKVQGRVTMTTDTSTSTGYMELRSLRSDDTAVYYCARGDFRKPFDYWGQGTLVTVSS

SEQ ID NO: 1539 - DNA, 345 bp, Artificial Sequence
  Description of Artificial Sequence: Synthetic variable light chain of Ab-65
ctgcctgtgctgactcagccggcttccctctctgcatcccccggagcatcagccagtctcacctgcaccttacgcagtggcctcaatgttggttcctacaggatatactggtaccagcagaagccagggagtcgtccccagtatctcctgaactacaaatcagactcaaataaacagcaggcctctggagtccccagccgcttctctggatccaaggatgcttcggccaatgcagggattttactcatctccgggctccagtctgaggatgaggctgactattactgtatgatttggtacagcagcgctgtggtattcggcggagggaccaagctgaccgtccta

SEQ ID NO: 1540 - protein, 115 aa, Artificial Sequence
  Description of Artificial Sequence: Synthetic variable light chain of Ab-65
LPVLTQPASLSASPGASASLTCTLRSGLNVGSYRIYWYQQKPGSRPQYLLNYKSDSNKQQASGVPSRFSGSKDASANAGILLISGLQSEDEADYYCMIWYSSAVVFGGGTKLTVL

SEQ ID NO: 1541 - protein, 5 aa, Artificial Sequence
  Description of Artificial Sequence: Synthetic Heavy chain CDR1 consensus, Ab-42
SYAIS

SEQ ID NO: 1542 - protein, 5 aa, Artificial Sequence
  Description of Artificial Sequence: Synthetic Heavy chain CDR1 of Ab-14, Ab-55
SYGIS

SEQ ID NO: 1543 - protein, 5 aa, Artificial Sequence
  Description of Artificial Sequence: Synthetic Heavy chain CDR1 of Ab-16
SYALS

SEQ ID NO: 1544 - protein, 5 aa, Artificial Sequence
  Description of Artificial Sequence: Synthetic Heavy chain CDR1 of Ab-22
DYAMH

SEQ ID NO: 1545 - protein, 5 aa, Artificial Sequence
  Description of Artificial Sequence: Synthetic Heavy chain CDR1 of Ab-30
NYDMS

SEQ ID NO: 1546 - protein, 5 aa, Artificial Sequence
  Description of Artificial Sequence: Synthetic Heavy chain CDR1 of Ab-31
GLYIH

SEQ ID NO: 1547 - protein, 5 aa, Artificial Sequence
  Description of Artificial Sequence: Synthetic Heavy chain CDR1 of Ab-32
DNAIS

SEQ ID NO: 1548 - protein, 5 aa, Artificial Sequence
  Description of Artificial Sequence: Synthetic Heavy chain CDR1 of Ab-38
SYAMS

SEQ ID NO: 1549 - protein, 5 aa, Artificial Sequence
  Description of Artificial Sequence: Synthetic Heavy chain CDR1 of Ab-46
TYALN

SEQ ID NO: 1550 - protein, 5 aa, Artificial Sequence
  Description of Artificial Sequence: Synthetic Heavy chain CDR1 of Ab-50
SHGIT

SEQ ID NO: 1551 - protein, 5 aa, Artificial Sequence
  Description of Artificial Sequence: Synthetic Heavy chain CDR1 Ab-52
RHGMH

SEQ ID NO: 1552 - protein, 5 aa, Artificial Sequence
  Description of Artificial Sequence: Synthetic Heavy chain CDR1 of Ab-56
TYAFS

SEQ ID NO: 1553 - protein, 5 aa, Artificial Sequence
  Description of Artificial Sequence: Synthetic Heavy chain CDR1 of Ab-65
NYGIS

SEQ ID NO: 1554 - protein, 17 aa, Artificial Sequence
  Description of Artificial Sequence: Synthetic Heavy chain CDR2 consensus
WISPIGGSTNYAQKVQG

SEQ ID NO: 1555 - protein, 17 aa, Artificial Sequence
  Description of Artificial Sequence: Synthetic Heavy chain CDR2 of Ab-14
WISAYNGNTNYAQKLED

SEQ ID NO: 1556 - protein, 17 aa, Artificial Sequence
  Description of Artificial Sequence: Synthetic Heavy chain CDR2 of Ab-16
AISGGGGSTYYADSVKD

SEQ ID NO: 1557 - protein, 17 aa, Artificial Sequence
  Description of Artificial Sequence: Synthetic Heavy chain CDR2 of Ab-22
LISGDGGSTYYADSVKD

SEQ ID NO: 1558 - protein, 17 aa, Artificial Sequence
  Description of Artificial Sequence: Synthetic Heavy chain CDR2 of Ab-30
RVNWNGGSTTYADAVKD

SEQ ID NO: 1559 - protein, 17 aa, Artificial Sequence
  Description of Artificial Sequence: Synthetic Heavy chain CDR2 of Ab-31
WIIPIFGTANYAQKFED

SEQ ID NO: 1560 - protein, 17 aa, Artificial Sequence
  Description of Artificial Sequence: Synthetic Heavy chain CDR2 of Ab-32
WIIPIFGKPNYAQKFED

SEQ ID NO: 1561 - protein, 17 aa, Artificial Sequence
  Description of Artificial Sequence: Synthetic Heavy chain CDR2 of Ab-38
AISGSGGSTYYADSVKD

SEQ ID NO: 1562 - protein, 17 aa, Artificial Sequence
  Description of Artificial Sequence: Synthetic Heavy chain CDR2 of Ab-42
WIIPIFGTANYAQKFED

SEQ ID NO: 1563 - protein, 17 aa, Artificial Sequence
  Description of Artificial Sequence: Synthetic Heavy chain CDR2 of Ab-46
RIVPLIGLVNYAHNFED

SEQ ID NO: 1564 - protein, 17 aa, Artificial Sequence
  Description of Artificial Sequence: Synthetic Heavy chain CDR2 of Ab-50
WISAHNGHASNAQKVED

SEQ ID NO: 1565 - protein, 17 aa, Artificial Sequence
  Description of Artificial Sequence: Synthetic Heavy chain CDR2 of Ab-52
VISHDGSVKYYADSMKD

SEQ ID NO: 1566 - protein, 17 aa, Artificial Sequence
  Description of Artificial Sequence: Synthetic Heavy chain CDR2 of Ab-55
WTSPHNGLTAFAQILED

SEQ ID NO: 1567 - protein, 17 aa, Artificial Sequence
  Description of Artificial Sequence: Synthetic Heavy chain CDR2 of Ab-56
RIIPILGIANYAQKFED

SEQ ID NO: 1568 - protein, 17 aa, Artificial Sequence
  Description of Artificial Sequence: Synthetic Heavy chain CDR2 of Ab-65
WISAYNGNTNYAQKVED

SEQ ID NO: 1569 - protein, 19 aa, Artificial Sequence
  Description of Artificial Sequence: Synthetic Heavy chain CDR3 consensus
  MOD_RES (3)..(17): Any naturally occurring amino acid
GLXXXXXXXXXXXXXXXDV

SEQ ID NO: 1570 - protein, 15 aa, Artificial Sequence
  Description of Artificial Sequence: Synthetic Heavy chain CDR3 of Ab-14
ALPSGTILVGGWFDP

SEQ ID NO: 1571 - protein, 15 aa, Artificial Sequence
  Description of Artificial Sequence: Synthetic Heavy chain CDR3 of Ab-16
DVFPETFSMNYGMDV

SEQ ID NO: 1572 - protein, 19 aa, Artificial Sequence
  Description of Artificial Sequence: Synthetic Heavy chain CDR3 of Ab-22
VLLPCSSTSCYGSVGAFDI

SEQ ID NO: 1573 - protein, 8 aa, Artificial Sequence
  Description of Artificial Sequence: Synthetic Heavy chain CDR3 of Ab-30
EFVGAYDL

SEQ ID NO: 1574 - protein, 12 aa, Artificial Sequence
  Description of Artificial Sequence: Synthetic Heavy chain CDR3 of Ab-31
GLRWGIWGWFDP

SEQ ID NO: 1575 - protein, 12 aa, Artificial Sequence
  Description of Artificial Sequence: Synthetic Heavy chain CDR3 of Ab-32
TMVRGFLGVMDV

SEQ ID NO: 1576 - protein, 16 aa, Artificial Sequence
  Description of Artificial Sequence: Synthetic Heavy chain CDR3 of Ab-38
DQFVTIFGVPRYGMDV

SEQ ID NO: 1577 - protein, 11 aa, Artificial Sequence
  Description of Artificial Sequence: Synthetic Heavy chain CDR3 of Ab-42
GRQMFGAGIDF

SEQ ID NO: 1578 - protein, 9 aa, Artificial Sequence
  Description of Artificial Sequence: Synthetic Heavy chain CDR3 of Ab-46
EVYGGNSDY

SEQ ID NO: 1579 - protein, 11 aa, Artificial Sequence
  Description of Artificial Sequence: Synthetic Heavy chain CDR3 of Ab-50
VHAALYYGMDV

SEQ ID NO: 1580 - protein, 12 aa, Artificial Sequence
  Description of Artificial Sequence: Synthetic Heavy chain CDR3 of Ab-52
GLSYQVSGWFDP

SEQ ID NO: 1581 - protein, 11 aa, Artificial Sequence
  Description of Artificial Sequence: Synthetic Heavy chain CDR3 of Ab-55
VHPVFSYALDV

SEQ ID NO: 1582 - protein, 9 aa, Artificial Sequence
  Description of Artificial Sequence: Synthetic Heavy chain CDR3 of Ab-56
DGYGSDPVL

SEQ ID NO: 1583 - protein, 9 aa, Artificial Sequence
  Description of Artificial Sequence: Synthetic Heavy chain CDR3 of Ab-65
GDFRKPFDY

SEQ ID NO: 1584 - protein, 13 aa, Artificial Sequence
  Description of Artificial Sequence: Synthetic Light chain CDR1 consensus
TRSSGSIGSNYVQ

SEQ ID NO: 1585 - protein, 13 aa, Artificial Sequence
  Description of Artificial Sequence: Synthetic Light chain CDR1 of Ab-14
TRSSGNIASNYVQ

SEQ ID NO: 1586 - protein, 11 aa, Artificial Sequence
  Description of Artificial Sequence: Synthetic Light chain CDR1 of Ab-16
QGDSLRSYYAS

SEQ ID NO: 1587 - protein, 11 aa, Artificial Sequence
  Description of Artificial Sequence: Synthetic Light chain CDR1 of Ab-22
GGSDIGRKSVH

SEQ ID NO: 1588 - protein, 14 aa, Artificial Sequence
  Description of Artificial Sequence: Synthetic Light chain CDR1 of Ab-30
TGTSSDVGGYNYVS

SEQ ID NO: 1589 - protein, 11 aa, Artificial Sequence
  Description of Artificial Sequence: Synthetic Light chain CDR1 of Ab-31
RASQSIGNSLA

SEQ ID NO: 1590 - protein, 11 aa, Artificial Sequence
  Description of Artificial Sequence: Synthetic Light chain CDR1 of Ab-32
RASQGIGSYLA

SEQ ID NO: 1591 - protein, 11 aa, Artificial Sequence
  Description of Artificial Sequence: Synthetic Light chain CDR1 of Ab-38
SGDKLGNKYAY

SEQ ID NO: 1592 - protein, 13 aa, Artificial Sequence
  Description of Artificial Sequence: Synthetic Light chain CDR1 of Ab-42
TRSSGSIDSNYVQ

SEQ ID NO: 1593 - protein, 13 aa, Artificial Sequence
  Description of Artificial Sequence: Synthetic Light chain CDR1 of Ab-46
TRSSGNIGTNYVQ

SEQ ID NO: 1594 - protein, 11 aa, Artificial Sequence
  Description of Artificial Sequence: Synthetic Light chain CDR1 of Ab-50
GGNNIGSKGVH

SEQ ID NO: 1595 - protein, 13 aa, Artificial Sequence
  Description of Artificial Sequence: Synthetic Light chain CDR1 of Ab-52
TRSSGSIASNYVQ

SEQ ID NO: 1596 - protein, 13 aa, Artificial Sequence
  Description of Artificial Sequence: Synthetic Light chain CDR1 of Ab-55
TRSSGSIASNYVQ

SEQ ID NO: 1597 - protein, 13 aa, Artificial Sequence
  Description of Artificial Sequence: Synthetic Light chain CDR1 of Ab-56
TRSSGSIASHYVQ

SEQ ID NO: 1598 - protein, 14 aa, Artificial Sequence
  Description of Artificial Sequence: Synthetic Light chain CDR1 of Ab-65
TLRSGLNVGSYRIY

SEQ ID NO: 1599 - protein, 7 aa, Artificial Sequence
  Description of Artificial Sequence: Synthetic Light chain CDR2 of consensus, Ab-14, Ab-42, Ab-52, Ab-55
EDNQRPS

SEQ ID NO: 1600 - protein, 7 aa, Artificial Sequence
  Description of Artificial Sequence: Synthetic Light chain CDR2 of Ab-16
GKNNRPS

SEQ ID NO: 1601 - protein, 7 aa, Artificial Sequence
  Description of Artificial Sequence: Synthetic Light chain CDR2 of Ab-22
SDRDRPS

SEQ ID NO: 1602 - protein, 7 aa, Artificial Sequence
  Description of Artificial Sequence: Synthetic Light chain CDR2 of Ab-30
DVSNRPS

SEQ ID NO: 1603 - protein, 7 aa, Artificial Sequence
  Description of Artificial Sequence: Synthetic Light chain CDR2 of Ab-31
GASSRAT

SEQ ID NO: 1604 - protein, 7 aa, Artificial Sequence
  Description of Artificial Sequence: Synthetic Light chain CDR2 of Ab-32
AASTLQS

SEQ ID NO: 1605 - protein, 7 aa, Artificial Sequence
  Description of Artificial Sequence: Synthetic Light chain CDR2 of Ab-38
QDIKRPS

SEQ ID NO: 1606 - protein, 7 aa, Artificial Sequence
  Description of Artificial Sequence: Synthetic Light chain CDR2 of Ab-46
EDYRRPS

SEQ ID NO: 1607 - protein, 7 aa, Artificial Sequence
  Description of Artificial Sequence: Synthetic Light chain CDR2 of Ab-50
DDSDRPS

SEQ ID NO: 1608 - protein, 7 aa, Artificial Sequence
  Description of Artificial Sequence: Synthetic Light chain CDR2 of Ab-56
EDNKRPS

SEQ ID NO: 1609 - protein, 11 aa, Artificial Sequence
  Description of Artificial Sequence: Synthetic Light chain CDR2 of Ab-65
YKSDSNKQQAS

SEQ ID NO: 1610 - protein, 9 aa, Artificial Sequence
  Description of Artificial Sequence: Synthetic Light chain CDR3 consensus
QSYDSSTWV

SEQ ID NO: 1611 - protein, 10 aa, Artificial Sequence
  Description of Artificial Sequence: Synthetic Light chain CDR3 of Ab-14
QSYDSSNLWV

SEQ ID NO: 1612 - protein, 11 aa, Artificial Sequence
  Description of Artificial Sequence: Synthetic Light chain CDR3 of Ab-16
NSRDSSGNHYV

SEQ ID NO: 1613 - protein, 11 aa, Artificial Sequence
  Description of Artificial Sequence: Synthetic Light chain CDR3 of Ab-22
QVWDNNSDHYV

SEQ ID NO: 1614 - protein, 9 aa, Artificial Sequence
  Description of Artificial Sequence: Synthetic Light chain CDR3 of Ab-30
SSYTSSTLP

SEQ ID NO: 1615 - protein, 9 aa, Artificial Sequence
  Description of Artificial Sequence: Synthetic Light chain CDR3 of Ab-31
QQHTIPTFS

SEQ ID NO: 1616 - protein, 9 aa, Artificial Sequence
  Description of Artificial Sequence: Synthetic Light chain CDR3 of Ab-32
QQLNNYPIT

SEQ ID NO: 1617 - protein, 8 aa, Artificial Sequence
  Description of Artificial Sequence: Synthetic Light chain CDR3 of Ab-38
QTWDNSVV

SEQ ID NO: 1618 - protein, 11 aa, Artificial Sequence
  Description of Artificial Sequence: Synthetic Light chain CDR3 of Ab-42
QSYDSNNRHVI

SEQ ID NO: 1619 - protein, 9 aa, Artificial Sequence
  Description of Artificial Sequence: Synthetic Light chain CDR3 of Ab-46
QSYHSSGWE

SEQ ID NO: 1620 - protein, 11 aa, Artificial Sequence
  Description of Artificial Sequence: Synthetic Light chain CDR3 of Ab-50
QVWDSSSDHWV

SEQ ID NO: 1621 - protein, 10 aa, Artificial Sequence
  Description of Artificial Sequence: Synthetic Light chain CDR3 of Ab-52
QSYDSTTPSV

SEQ ID NO: 1622 - protein, 9 aa, Artificial Sequence
  Description of Artificial Sequence: Synthetic Light chain CDR3 of Ab-55
QSYDGITVI

SEQ ID NO: 1623 - protein, 10 aa, Artificial Sequence
  Description of Artificial Sequence: Synthetic Light chain CDR3 of Ab-56
QSYDSSNRWV

SEQ ID NO: 1624 - protein, 9 aa, Artificial Sequence
  Description of Artificial Sequence: Synthetic Light chain CDR3 of Ab-65
MIWYSSAVV

SEQ ID NO: 1625 - DNA, 717 bp, Homo sapiens
gaggtgcagctggtgcagtctgggggaggcgtggtccagcctgggaagtccctgagactctcctgtgcagcctctggattcgccttcagtagttatgctatgcactgggtccgccaggctccaggcaaggggctggagtgggtggcagttatatcatatgatggaagtaataaatactacgcagactccgtgaagggccgattcaccatctccagagacaattccaagaacacgctgtatctgcaaatgaacagcctgagagctgaggacacggctgtgtattactgtgcgagggacaggagctactaccttgactactggggccagggaaccctggtcaccgtctcctcaggtggcggcggttccggaggtggtggttctggcggtggtggcagcgaaacgacactcacgcagtctccagccaccctgtctttgtctccaggggaaagggccaccctctcctgcagggccagtcagagtgttaggagcaacttagcctggtaccagcagaaacctggccaggctcccaggcccctcatctatgatgcatccaccagggccactggcatcccagacaggttcagtggcagtgggtctgggacagacttcactctcaccatcagcagactggagcctgaagattttgcagtttattactgtcagcagcgtagcaactggcctccgacgttcggccaagggaccaaggtggaagtcaaa

SEQ ID NO: 1626 - DNA, 351 bp, Homo sapiens
gaggtgcagctggtgcagtctgggggaggcgtggtccagcctgggaagtccctgagactctcctgtgcagcctctggattcgccttcagtagttatgctatgcactgggtccgccaggctccaggcaaggggctggagtgggtggcagttatatcatatgatggaagtaataaatactacgcagactccgtgaagggccgattcaccatctccagagacaattccaagaacacgctgtatctgcaaatgaacagcctgagagctgaggacacggctgtgtattactgtgcgagggacaggagctactaccttgactactggggccagggaaccctggtcaccgtctcctca

SEQ ID NO: 1627 - DNA, 987 bp, Homo sapiens
gctagcaccaagggcccatcggtcttccccctggcaccctcctccaagagcacctctgggggcacagcggccctgggctgcctggtcaaggactacttccccgaaccggtgacggtgtcgtggaactcaggcgccctgaccagcggcgtgcacaccttcccggctgtcctacagtcctcaggactctactccctcagcagcgtggtgaccgtgccctccagcagcttgggcacccagacctacatctgcaacgtgaatcacaagcccagcaccaaggtggacaagaaagcagagcccaaatcttgtgacaaaactcacacatccccaccgtgcccagcacctgaactcctggggggaccgtcagtcttcctcttccccccaaaacccaaggacaccctcaggatctcccggacccctgaggtcacatgcgtggtggtggacgtgagccacgaagaccctgaggtcaagttcaactggtacgtggacggcgtggaggtgcataatgccaagacaaagccgcgggaggagcagtacagcacgtaccgggtggtcagcgtcctcaccgtcctgcaccaggactggctgaatggcaaggagtacaagtgcaaggtctccaacaaagccctcccagcccccatcgagaaaaccatctccaaagccaaagggcagccccgagaaccacaggtgtacaccctgcccccatcccgggatgagctgaccaagaaccaggtcagcctgacctgcctggtcaaaggcttctatcccagcgacatcgccgtggagtgggagagcaatgggcagccggagaacaactacaagaccacgcctcccgtgctggactccgacggctccttcttcctctacagcaagctcaccgtggacaagagcaggtggcagcaggggaacgtcttctcatgctccgtgatgcatgaggctctgcacaaccactacacgcagaagagcctctccctgtctccgggtaaatga

SEQ ID NO: 1628 - DNA, 318 bp, Homo sapiens
acgacactcacgcagtctccagccaccctgtctttgtctccaggggaaagggccaccctctcctgcagggccagtcagagtgttaggagcaacttagcctggtaccagcagaaacctggccaggctcccaggcccctcatctatgatgcatccaccagggccactggcatcccagacaggttcagtggcagtgggtctgggacagacttcactctcaccatcagcagactggagcctgaagattttgcagtttattactgtcagcagcgtagcaactggcctccgacgttcggccaagggaccaaggtggaagtcaaa

SEQ ID NO: 1629 - DNA, 348 bp, Homo sapiens
gatggtaccaaggtggaaatcaaacgtacggtggctgcaccatctgtcttcatcttcccgccatctgatgagcagttgaaatctggaactgcctctgttgtgtgcctgctgaataacttctatcccagagaggccaaagtacagtggaaggtggataacgccctccaatcgggtaactcccaggagagtgtcacagagcaggacagcaaggacagcacctacagcctcagcagcaccctgacgctgagcaaagcagactacgagaaacacaaagtctacgcctgcgaagtcacccatcagggcctgagctcgcccgtcacaaagagcttcaacaggggagagtgttga

SEQ ID NO: 1630 - protein, 102 aa, Homo sapiens
QVQLVQSGGGVPGSLRLSCAASGFTFSSYMSWVRQAPGKGLEWVISGSYYADSVKGRFTISRDNSKNTLYLQMNSLRAEDTAVYYCARDDYWGQGTLVTVSS

SEQ ID NO: 1631 - protein, 116 aa, Homo sapiens
QVQLVQSGGGVVQPGRSLRLSCAASGFTVSSNYMSWVRQAPGKGLEWVSVIYSGGSTYYADSVKGRFTISRDNSKNTLYLQMNSLRAEDTAVYYCAKDYGEGFDYWGQGTLVTVSS

SEQ ID NO: 1632 - protein, 117 aa, Homo sapiens
EVQLVQSGGGLVKPGGSLRLSCAASGFTFSDYYMSWIRQAPGKGLEWVSYISSSGSTIYYADSVKGRFTISRDNAKNSLYLQMNSLRAEDTGVYYCARDWGYSFGDWGQGTLVTVSS

SEQ ID NO: 1633 - protein, 127 aa, Homo sapiens
QVQLVQSGAEVKKPGASVKVSCKASGYTFTTYGISWVRQAPGQGLEWMGWISAYNGNTNYAQKLQGRVTMTTDTSTSTAYMELRSLRSDDTAVYYCARVGYYGDYAWGYYYYGMDVWGQGTLVTVSS

SEQ ID NO: 1634 - protein, 122 aa, Homo sapiens
QVQLQESGGGLVKPGGSLRLSCAASGFTFSDYYMSWIRQAPGKGLEWVSYISSSGSTIYYADSVKGRFTISRDNAKNSLYLQMNSLRAEDTAVYYCARERWLQIGEDAFDIWGQGTTVTVSS

SEQ ID NO: 1635 - protein, 116 aa, Homo sapiens
QVQLVQSGGGLIQPGGSLRLSCAASGFTVSSNYMSWVRQAPGKGLEWVSVIYSGGSTYYADSVKGRFTISRDNSKNTLYLQMNSLRAEDTAVYYCARNFGEDFDYWGQGTLVTVSS

SEQ ID NO: 1636 - protein, 117 aa, Homo sapiens
EVQLVQSGGGVVQPGKSLRLSCAASGFAFSSYAMHWVRQAPGKGLEWVAVISYDGSNKYYADSVKGRFTISRDNSKNTLYLQMNSLRAEDTAVYYCARDRSYYLDYWGQGTLVTVSS

SEQ ID NO: 1637 - protein, 124 aa, Homo sapiens
QVQLVQSGGGLVQPGGSLRLSCAASGFTFSSSWMSWVRQAPGKGLEWVAYIKQDGSEKYYVDSVKGRFTISRDNAKNSLYLQMDSLRAEDTAVYYCARDQGWGWDGTEYYSDYWGQGTLVTVSS

SEQ ID NO: 1638 - protein, 123 aa, Homo sapiens
QVQLVQSGAEVKKPGASVKVSCKASGYTFTSYGISWVRQAPGQGLEWMGWISAYNGNTNYAQKLQGRVTMTTDTSTSTAYMELRSLRSDDTAVYYCARDDLSDYGEWLGPDYWGQGTLVTVSS

SEQ ID NO: 1639 - protein, 81 aa, Homo sapiens
QLTQPSSGSPGQRTISCGSSGNVSWYQQPGAPKLLIYRPSGVPDRFSGSKSGTASLTISGLQEDEADYYCVFGGTKLTVLG

SEQ ID NO: 1640 - protein, 106 aa, homo sapiens
IQMTQSPSSLSASVGDRVTITCRATQSISTHLNWYQQRGGKAPKLLIYGASTLESGVPSRFSGSGSGTEFTLTISSLQPEDFATYYCLQHRSYPWTFGQGTNVEIK

SEQ ID NO: 1641 - protein, 112 aa, Homo sapiens
SYELTQPPSASGTPGQRVTISCSGSSSSIGSETVNWYQQLPGTAPKLLIYSNNQRPSGVPDRFSGSKSGTSASLAISGLQSEDEADYYCTAWDDTLNGRVIFGGGTKLTVLG

SEQ ID NO: 1642 - protein, 111 aa, Homo sapiens
QTVVTQEPSFSVSPGGTITLTCDLNSGLVSSSHYPSWYQQTPGQAPRTLIYNTNIRSSGVPDRFSGAILGNKAALTITGAQAEDESDYYCVLYMGSGISVFGGGTKLTVLG

SEQ ID NO: 1643 - protein, 111 aa, Homo sapiens
QSALTQPASVSGSPGQSITISCTGTSSDLGGHNFVSWYQQHPGKAPKLMIYDVFNRPSGVSSRFSGSKSGNTASLTISGLQAEDEADYFCSSYTITNIVVFGRGTKLTVLG

SEQ ID NO: 1644 - protein, 106 aa, Homo sapiens
TTLTQSPATLSLSPGERATLSCRASQSVRSNLAWYQQKPGQAPRPLIYDASTRATGIPDRFSGSGSGTDFTLTISRLEPEDFAVYYCQQRSNWPPTFGQGTKVEVK

SEQ ID NO: 1645 - protein, 111 aa, Homo sapiens
QSALTQPASVSGSPGQSITISCTGTSSDVGGYNYVSWYQQHPGKAPKLMIYDVSKRPSGVPDRFSGSKSGNTASLTISGLQAEDEADYFCSSYTITDIVVFGGGTKLTVLR

SEQ ID NO: 1646 - protein, 111 aa, Homo sapiens
QPGLTQPPSASGTPGQRVTISCSGSRSNIGGNTVNWYQHVPGTAPKLLIYSNNQRPSGVPDRFSGSKSGTSASLAISGLRSEDEAEYYCATWEDSLSGYVFGPGTKVTVLG

SEQ ID NO: 1647 - protein, 15 aa, Homo sapiens
RTMHPSDEFLPLGMP

SEQ ID NO: 1648 - protein, 15 aa, Homo sapiens
VVPLGRCVSHPAICA

SEQ ID NO: 1649 - protein, 15 aa, Homo sapiens
SVDDCRWNLNCEPPP

SEQ ID NO: 1650 - protein, 13 aa, Homo sapiens
CLSATCDCTLCGP

SEQ ID NO: 1651 - protein, 15 aa, Homo sapiens
GTGLVPLFDPRYRFL

SEQ ID NO: 1652 - protein, 15 aa, Homo sapiens
PNCWVGLTGAHSCFL

SEQ ID NO: 1653 - protein, 14 aa, Homo sapiens
YQADCLMNRCPTAE

SEQ ID NO: 1654 - protein, 669 aa, Homo sapiens
MFIFLLFLTLTSGSDLDRCTTFDDVQAPNYTQHTSSMRGVYYPDEIFRSDTLYLTQDLFLPFYSNVTGFHTINHTFGNPVIPFKDGIYFAATEKSNVVRGWVFGSTMNNKSQSVIIINNSTNVVIRACNFELCDNPFFAVSKPMGTQTHTMIFDNAFNCTFEYISDAFSLDVSEKSGNFKHLREFVFKNKDGFLYVYKGYQPIDVVRDLPSGFNTLKPIFKLPLGINITNFRAILTAFSPAQDIWGTSAAAYFVGYLKPTTFMLKYDENGTITDAVDCSQNPLAELKCSVKSFEIDKGIYQTSNFRVVPSGDVVRFPNITNLCPFGEVFNPSVYAWERKKISNCVADYSVLYNSTFFSTFKCYGVSATKLNDLCFSNVYADSFVVKGDDVRQIAPGQTGVIADYNYKLPDDFMGCVLAWNTRNIDATSTGNYNYKYRYLRHGKLRPFERDISNVPFSPDGKPCTPPALNCYWPLNDYGFYTTTGIGYQPYRVVVLSFELLNAPATVCGPKLSTDLIKNQCVNFNFNGLTGTGVLTPSSKRFQPFQQFGRDVSDFTDSVRDPKTSEILDISPCAFGGVSVITPGTNASSEVAVLYQDVNCTDVSTAIHADQLTPAWRIYSTGNNVFQTQAGCLIGAEHVDTSYECDIPIGAGICASYHTVSLLRSTSQKS

SEQ ID NO: 1655 - protein, 20 aa, Homo sapiens
RVVVLSFELGPPGGPFGEVF

SEQ ID NO: 1656 - protein, 14 aa, Homo sapiens
VVVSFELNLCPFGE

SEQ ID NO: 1657 - protein, 11 aa, Homo sapiens
  MOD_RES (5)..(7): Any amino acid
SFELXXXPFGE

SEQ ID NO: 1658 - protein, 13 aa, Homo sapiens
  MOD_RES (5)..(9): Any amino acid
SFELXXXXXPFGE

SEQ ID NO: 1659 - protein, 5 aa, Homo sapiens
VYDNK

SEQ ID NO: 1660 - protein, 5 aa, Homo sapiens
RSYYL

SEQ ID NO: 1661 - protein, 10 aa, Homo sapiens
RASQVRSNLA

SEQ ID NO: 1662 - protein, 6 aa, Homo sapiens
DASTAT

SEQ ID NO: 1663 - protein, 9 aa, Homo sapiens
QQRSNWPPT

SEQ ID NO: 1664 - protein, 13 aa, Homo sapiens
CLSATCDCTLCGP

SEQ ID NO: 1665 - DNA, 390 bp, Artificial Sequence; identical to SEQ ID NO: 1471
  Description of Artificial Sequence: Synthetic polynucleotide

SEQ ID NO: 1666 - protein, 130 aa, Artificial Sequence; identical to SEQ ID NO: 1472
  Description of Artificial Sequence: Synthetic polypeptide

SEQ ID NO: 1667 - DNA, 330 bp, Artificial Sequence
  Description of Artificial Sequence: Synthetic polynucleotide
aattttatgctgactcagccaccctcagcgtctgggacccccgggcagagggtcaccatctcttgctctggaagcagctccaacatcggaggtaatactgtacactggttccagcagctcccaggaacggcccccaaactcctcatctatactaatagtctgcggccctcaggggtccctgaccgattctctggctccaagtctggcacctcagcctccctggccatcagtgggctccagtctgaggatgaggctgattattactgtgcagcatgggatgacagcctaaatggtcaggtgttcggcggagggaccaagctgaccgtccta

SEQ ID NO: 1668 - protein, 110 aa, Artificial Sequence; identical to SEQ ID NO: 1473
  Description of Artificial Sequence: Synthetic polypeptide

SEQ ID NO: 1669 - DNA, 330 bp, Artificial Sequence; identical to SEQ ID NO: 1474
  Description of Artificial Sequence: Synthetic polynucleotide

SEQ ID NO: 1670 - protein, 110 aa, Artificial Sequence; identical to SEQ ID NO: 1475
  Description of Artificial Sequence: Synthetic polypeptide

SEQ ID NO: 1671 - protein, 8 aa, Artificial Sequence
  Description of Artificial Sequence: Synthetic peptide
GFTFSNYG

SEQ ID NO: 1672 - protein, 8 aa, Artificial Sequence
  Description of Artificial Sequence: Synthetic peptide
ISFDGSKK

SEQ ID NO: 1673 - protein, 25 aa, Artificial Sequence
  Description of Artificial Sequence: Synthetic peptide
CAKLPSPYYFDSRFVWVAASAFHFW

SEQ ID NO: 1674 - protein, 8 aa, Artificial Sequence
  Description of Artificial Sequence: Synthetic peptide
SSNIGGNT

SEQ ID NO: 1675 - protein, 3 aa, Artificial Sequence
  Description of Artificial Sequence: Synthetic peptide
TNS

SEQ ID NO: 1676 - protein, 13 aa, Artificial Sequence [sequence omitted]

SEQ ID NO: 1677 - protein, 13 aa, Artificial Sequence
  Description of Artificial Sequence: Synthetic peptide
CAAWDNSLNGQVF

SEQ ID NO: 1678 - DNA, 354 bp, Artificial Sequence; identical to SEQ ID NO: 1315
  Description of Artificial Sequence: Synthetic polynucleotide

SEQ ID NO: 1679 - DNA, 336 bp, Artificial Sequence; identical to SEQ ID NO: 1317
  Description of Artificial Sequence: Synthetic polynucleotide

SEQ ID NO: 1680 - DNA, 354 bp, Artificial Sequence; identical to SEQ ID NO: 1182
  Description of Artificial Sequence: Synthetic polynucleotide

SEQ ID NO: 1681 - DNA, 336 bp, Artificial Sequence; identical to SEQ ID NO: 1184
  Description of Artificial Sequence: Synthetic polynucleotide

SEQ ID NO: 1682 - DNA, 354 bp, Artificial Sequence; identical to SEQ ID NO: 1186
  Description of Artificial Sequence: Synthetic polynucleotide

SEQ ID NO: 1683 - DNA, 336 bp, Artificial Sequence; identical to SEQ ID NO: 1188
  Description of Artificial Sequence: Synthetic polynucleotide

SEQ ID NO: 1684 - DNA, 354 bp, Artificial Sequence; identical to SEQ ID NO: 1190
  Description of Artificial Sequence: Synthetic polynucleotide

SEQ ID NO: 1685 - DNA, 336 bp, Artificial Sequence; identical to SEQ ID NO: 1192
  Description of Artificial Sequence: Synthetic polynucleotide

SEQ ID NO: 1686 - DNA, 354 bp, Artificial Sequence; identical to SEQ ID NO: 1194
  Description of Artificial Sequence: Synthetic polynucleotide

SEQ ID NO: 1687 - DNA, 336 bp, Artificial Sequence
  Description of Artificial Sequence: Synthetic polynucleotide
gacatcgtgatgacccagagccccgacagcctggccgtgagcctgggcgagcgggccactatagcagctacaccttcggccagggcacaaagctggaaatcaagccatcaactgcaagagcagccagagcatcctgtacagcagcaaccagaagaactacctggcctggtatcagcagaagcccggccagagccccaagctgctgatctactgggccagcacccgggagagcggcgtgcccgaccggtttagcggcagcggctccggcaccgacttcaccctgaccatcagcagcctgcaggccgaggacgtggccgtgtactactgccaccagta

SEQ ID NO: 1688 - DNA, 354 bp, Artificial Sequence; identical to SEQ ID NO: 966
  Description of Artificial Sequence: Synthetic polynucleotide

SEQ ID NO: 1689 - DNA, 336 bp, Artificial Sequence; identical to SEQ ID NO: 968
  Description of Artificial Sequence: Synthetic polynucleotide

SEQ ID NO: 1690 - protein, 118 aa, Artificial Sequence; identical to SEQ ID NO: 1199
  Description of Artificial Sequence: Synthetic polypeptide

SEQ ID NO: 1691 - protein, 112 aa, Artificial Sequence; identical to SEQ ID NO: 1201
  Description of Artificial Sequence: Synthetic polypeptide

SEQ ID NO: 1692 - protein, 118 aa, Artificial Sequence; identical to SEQ ID NO: 1183
  Description of Artificial Sequence: Synthetic polypeptide

SEQ ID NO: 1693 - protein, 112 aa, Artificial Sequence; identical to SEQ ID NO: 1185
  Description of Artificial Sequence: Synthetic polypeptide

SEQ ID NO: 1694 - protein, 118 aa, Artificial Sequence; identical to SEQ ID NO: 1187
  Description of Artificial Sequence: Synthetic polypeptide

SEQ ID NO: 1695 - protein, 112 aa, Artificial Sequence; identical to SEQ ID NO: 1189
  Description of Artificial Sequence: Synthetic polypeptide

SEQ ID NO: 1696 - protein, 118 aa, Artificial Sequence; identical to SEQ ID NO: 1191
  Description of Artificial Sequence: Synthetic polypeptide

SEQ ID NO: 1697 - protein, 112 aa, Artificial Sequence; identical to SEQ ID NO: 1193
  Description of Artificial Sequence: Synthetic polypeptide

SEQ ID NO: 1698 - protein, 118 aa, Artificial Sequence; identical to SEQ ID NO: 1195
  Description of Artificial Sequence: Synthetic polypeptide

SEQ ID NO: 1699 - protein, 112 aa, Artificial Sequence; identical to SEQ ID NO: 1197
  Description of Artificial Sequence: Synthetic polypeptide

SEQ ID NO: 1700 - protein, 118 aa, Artificial Sequence; identical to SEQ ID NO: 967
  Description of Artificial Sequence: Synthetic polypeptide

SEQ ID NO: 1701 - protein, 112 aa, Artificial Sequence; identical to SEQ ID NO: 969
  Description of Artificial Sequence: Synthetic polypeptide

SEQ ID NO: 1702 - protein, 8 aa, Artificial Sequence
  Description of Artificial Sequence: Synthetic peptide
GYTFASYY

SEQ ID NO: 1703 - protein, 8 aa, Artificial Sequence
  Description of Artificial Sequence: Synthetic peptide
INPGNVNT

SEQ ID NO: 1704 - protein, 9 aa, Artificial Sequence
  Description of Artificial Sequence: Synthetic peptide
STYYRPLDY

SEQ ID NO: 1705 - protein, 12 aa, Artificial Sequence
  Description of Artificial Sequence: Synthetic peptide
QSILYSSNQKNY

SEQ ID NO: 1706 - protein, 6 aa, Artificial Sequence
  Description of Artificial Sequence: Synthetic peptide
WASTRE

SEQ ID NO: 1707 - protein, 8 aa, Artificial Sequence
  Description of Artificial Sequence: Synthetic peptide
HQYLSSYT

SEQ ID NO: 1708 - protein, 8 aa, Artificial Sequence
  Description of Artificial Sequence: Synthetic peptide
GYTFASYY

SEQ ID NO: 1709 - protein, 8 aa, Artificial Sequence
  Description of Artificial Sequence: Synthetic peptide
INPGNVNT

SEQ ID NO: 1710 - protein, 9 aa, Artificial Sequence
  Description of Artificial Sequence: Synthetic peptide
STYYRPLDY

SEQ ID NO: 1711 - protein, 12 aa, Artificial Sequence
  Description of Artificial Sequence: Synthetic peptide
QSILYSSNQKNY

SEQ ID NO: 1712 - protein, 6 aa, Artificial Sequence
  Description of Artificial Sequence: Synthetic peptide
WASTRE

SEQ ID NO: 1713 - protein, 8 aa, Artificial Sequence
  Description of Artificial Sequence: Synthetic peptide
HQYLSSYT

SEQ ID NO: 1714 - protein, 8 aa, Artificial Sequence
  Description of Artificial Sequence: Synthetic peptide
GYTFASQW

SEQ ID NO: 1715 - protein, 8 aa, Artificial Sequence
  Description of Artificial Sequence: Synthetic peptide
INPGNVNT

SEQ ID NO: 1716 - protein, 9 aa, Artificial Sequence
  Description of Artificial Sequence: Synthetic peptide
STWYRPLDY

SEQ ID NO: 1717 - protein, 12 aa, Artificial Sequence
  Description of Artificial Sequence: Synthetic peptide
QSILYSSNQKNY

SEQ ID NO: 1718 - protein, 6 aa, Artificial Sequence
  Description of Artificial Sequence: Synthetic peptide
WASTRE

SEQ ID NO: 1719 - protein, 8 aa, Artificial Sequence
  Description of Artificial Sequence: Synthetic peptide
HQYISSYT

SEQ ID NO: 1720 - protein, 8 aa, Artificial Sequence
  Description of Artificial Sequence: Synthetic peptide
GYTFASSW

SEQ ID NO: 1721 - protein, 8 aa, Artificial Sequence
  Description of Artificial Sequence: Synthetic peptide
INPGNVNT

SEQ ID NO: 1722 - protein, 9 aa, Artificial Sequence
  Description of Artificial Sequence: Synthetic peptide
STWYRPNDY

SEQ ID NO: 1723 - protein, 12 aa, Artificial Sequence
  Description of Artificial Sequence: Synthetic peptide
QSILYSSNQKNY

SEQ ID NO: 1724 - protein, 6 aa, Artificial Sequence
  Description of Artificial Sequence: Synthetic peptide
WASTRE

SEQ ID NO: 1725 - protein, 8 aa, Artificial Sequence
  Description of Artificial Sequence: Synthetic peptide
HQYKSSYT

SEQ ID NO: 1726 - protein, 8 aa, Artificial Sequence
  Description of Artificial Sequence: Synthetic peptide
GYTFASSW

SEQ ID NO: 1727 - protein, 8 aa, Artificial Sequence
  Description of Artificial Sequence: Synthetic peptide
INPGNVNT

SEQ ID NO: 1728 - protein, 9 aa, Artificial Sequence
  Description of Artificial Sequence: Synthetic peptide
TIRYRPLDY

SEQ ID NO: 1729 - protein, 12 aa, Artificial Sequence
  Description of Artificial Sequence: Synthetic peptide
QSILYSSNQKNY

SEQ ID NO: 1730 - protein, 6 aa, Artificial Sequence
  Description of Artificial Sequence: Synthetic peptide
WASTRE

SEQ ID NO: 1731 - protein, 8 aa, Artificial Sequence
  Description of Artificial Sequence: Synthetic peptide
HQYRSSYT

SEQ ID NO: 1732 - protein, 8 aa, Artificial Sequence
  Description of Artificial Sequence: Synthetic peptide
GYTFASSW

SEQ ID NO: 1733 - protein, 8 aa, Artificial Sequence
  Description of Artificial Sequence: Synthetic peptide
INPGNVNT

SEQ ID NO: 1734 - protein, 9 aa, Artificial Sequence
  Description of Artificial Sequence: Synthetic peptide
LTYYRPPDY

SEQ ID NO: 1735 - protein, 12 aa, Artificial Sequence
  Description of Artificial Sequence: Synthetic peptide
QSILYSSNQKNY

SEQ ID NO: 1736 - protein, 6 aa, Artificial Sequence
  Description of Artificial Sequence: Synthetic peptide
WASTRE

SEQ ID NO: 1737 - protein, 8 aa, Artificial Sequence
  Description of Artificial Sequence: Synthetic peptide
HQYYSSYT

SEQ ID NO: 1738 - protein, 8 aa, Artificial Sequence
  Description of Artificial Sequence: Synthetic peptide
GYTFASAW

SEQ ID NO: 1739 - protein, 8 aa, Artificial Sequence
  Description of Artificial Sequence: Synthetic peptide
INPGNVNT

SEQ ID NO: 1740 - protein, 9 aa, Artificial Sequence
  Description of Artificial Sequence: Synthetic peptide
STYYRPLDY

SEQ ID NO: 1741 - protein, 12 aa, Artificial Sequence
  Description of Artificial Sequence: Synthetic peptide
QSILYSSNQKNY

SEQ ID NO: 1742 - protein, 6 aa, Artificial Sequence
  Description of Artificial Sequence: Synthetic peptide
WASTRE

SEQ ID NO: 1743 - protein, 8 aa, Artificial Sequence
  Description of Artificial Sequence: Synthetic peptide
HQYMSSYT

SEQ ID NO: 1744 - DNA, 354 bp, Artificial Sequence; identical to SEQ ID NO: 1163
  Description of Artificial Sequence: Synthetic polynucleotide

SEQ ID NO: 1745 - DNA, 321 bp, Artificial Sequence
  Description of Artificial Sequence: Synthetic polynucleotide
gacatccagatgacccagagccccagcagcctgagcgccagcgtgggcgacagagtgaccatcacctgcagagccagccagggcatcagcagcaacatcgtgtggtaccagcagaagcccggcaaggcccccaagggcctgatctaccacggcaccaacctggagagcggcgtgcccagcagattcagcggcagcggcagcggcaccgactacaccctgaccatcagcagcctgcagcccgaggacttcgccacctactactgcgtgcagtacagccagttcccccccaccttcggccagggcaccaagctggagatcaag

SEQ ID NO: 1746 - DNA, 354 bp, Artificial Sequence; identical to SEQ ID NO: 1153
  Description of Artificial Sequence: Synthetic polynucleotide

SEQ ID NO: 1747 - DNA, 321 bp, Artificial Sequence; identical to SEQ ID NO: 1155
  Description of Artificial Sequence: Synthetic polynucleotide

SEQ ID NO: 1748 - DNA, 354 bp, Artificial Sequence; identical to SEQ ID NO: 1163
  Description of Artificial Sequence: Synthetic polynucleotide

SEQ ID NO: 1749 - DNA, 321 bp, Artificial Sequence; identical to SEQ ID NO: 1155
  Description of Artificial Sequence: Synthetic polynucleotide

SEQ ID NO: 1750 - protein, 118 aa, Artificial Sequence; identical to SEQ ID NO: 1164
  Description of Artificial Sequence: Synthetic polypeptide

SEQ ID NO: 1751 - protein, 106 aa, Artificial Sequence
  Description of Artificial Sequence: Synthetic polypeptide
DIQMTQSPSSLSASVGDRVTITCRASQGISSNIVWYQQKPGKAPKGLIYHGTNLESGVPSRFSGSGSGTDYTLTISSLQPEDFATYYCVQYSQFPPTFGQGTKLEI

SEQ ID NO: 1752 - protein, 118 aa, Artificial Sequence; identical to SEQ ID NO: 1154
  Description of Artificial Sequence: Synthetic polypeptide

SEQ ID NO: 1753 - protein, 107 aa, Artificial Sequence; identical to SEQ ID NO: 1156
  Description of Artificial Sequence: Synthetic polypeptide

SEQ ID NO: 1754 - protein, 118 aa, Artificial Sequence; identical to SEQ ID NO: 1164
  Description of Artificial Sequence: Synthetic polypeptide

SEQ ID NO: 1755 - protein, 107 aa, Artificial Sequence; identical to SEQ ID NO: 1156
  Description of Artificial Sequence: Synthetic polypeptide

SEQ ID NO: 1756 - protein, 8 aa, Artificial Sequence
  Description of Artificial Sequence: Synthetic peptide
GYTFTSYW

SEQ ID NO: 1757 - protein, 8 aa, Artificial Sequence
  Description of Artificial Sequence: Synthetic peptide
VSPGNSDT

SEQ ID NO: 1758 - protein, 12 aa, Artificial Sequence
  Description of Artificial Sequence: Synthetic peptide
TRSRYGNNALDY

SEQ ID NO: 1759 - protein, 9 aa, Artificial Sequence
  Description of Artificial Sequence: Synthetic peptide
QGISSNIVW

SEQ ID NO: 1760 - protein, 3 aa, Artificial Sequence
  Description of Artificial Sequence: Synthetic peptide
HGT

SEQ ID NO: 1761 - protein, 9 aa, Artificial Sequence
  Description of Artificial Sequence: Synthetic peptide
VQYSQFPPT

SEQ ID NO: 1762 - DNA, 354 bp, Artificial Sequence
  Description of Artificial Sequence: Synthetic polynucleotide
caggtgcagctggtgcagtctggggctgaggtgaagaagcctggggcctcagtgaaagtctcctgcaaggcttctggatacaccttcagcggctactctacacactggctgcgacaggtccctggacagggacttgagtggattggatgggacaaccctagtagtggtgacacgacctatgcagagaattttcggggcagggtcaccctgaccagggacacgtccatcaccacagattacttggaagtgaggggtctaagatctgacgacacggccgtctattattgtgccagaggcggagatgactacagctttgaccattggggtcagggcaccctggtcaccgtctcctca

SEQ ID NO: 1763 - DNA, 327 bp, Artificial Sequence; identical to SEQ ID NO: 1227
  Description of Artificial Sequence: Synthetic polynucleotide

SEQ ID NO: 1764 - protein, 118 aa, Artificial Sequence
  Description of Artificial Sequence: Synthetic polypeptide
QVQLVQSGAEVKKPGASVKVSCKASGYTFSGYSTHWLRQVPGQGLEWIGWDNPSSGDTTYAENFRGRVTLTRDTSITTDYLEVRGLRSDDTAVYYCARGGDDYSFDHWGQGTLVTVSS

SEQ ID NO: 1765 - protein, 109 aa, Artificial Sequence
  Description of Artificial Sequence: Synthetic polypeptide
SSELTQDPAVSVALGQTVRITCRGDSLRSYYASWYQQKPGQAPVLVIYGENNRPSGIPDRFSGSSSGDTASLTITGAQAEDEADYYCNSRDSSDHLLLFGGGTKLTVLG

SEQ ID NO: 1766 - protein, 5 aa, Artificial Sequence
  Description of Artificial Sequence: Synthetic peptide
GYSTH

SEQ ID NO: 1767 - protein, 17 aa, Artificial Sequence
  Description of Artificial Sequence: Synthetic peptide
WDNPSSGDTTYAENFRG

SEQ ID NO: 1768 - protein, 9 aa, Artificial Sequence
  Description of Artificial Sequence: Synthetic peptide
GGDDYSFDH

SEQ ID NO: 1769 - protein, 11 aa, Artificial Sequence
  Description of Artificial Sequence: Synthetic peptide
RGDSLRSYYAS

SEQ ID NO: 1770 - protein, 7 aa, Artificial Sequence
  Description of Artificial Sequence: Synthetic peptide
GENNRPS

SEQ ID NO: 1771 - protein, 11 aa, Artificial Sequence
  Description of Artificial Sequence: Synthetic peptide
NSRDSSDHLLL

SEQ ID NO: 1772 - DNA, 364 bp, Homo sapiens
caggtgcagctggtgcagtctgggggaggcgtggtacagcctggggggtccctgagactctcctgtgcagcctctggattcacctttgatgattatgccatgcactgggtccggcaagctccagggaagggcctggagtgggtctcaagtcttagttggaatactggtcgagtagcctatgcggactctgtgaagggccgattcaccatctccagagacaacgccaagaattccctgtatctgcaaatgaacagtctgagacctgaggacacggccttctattactgtgcaaaaggctccgcccttggcttagttggctggttcgacgcctggggccagggcaccctggtcaccgtctcctcag

SEQ ID NO: 1773 - DNA, 322 bp, Homo sapiens
tcttctgagctgactcaggaccctgctgtgtctgtggccttgggacagacagtcaggatcacatgccaaggagacagtctcagaacctattatggaagttggtaccagcagaagccaggacaggcccctctacttgtcttctatggcaaagagagtcggccctcagggatcccagaccgattctctggctccacctcaggaaacacagcttccttgaccatcactggggctcaggcggaagatgaggctgactattactgtaactcccaggacagcagtggtgacttattattcggcggagggaccaagctgaccgtcctag

SEQ ID NO: 1774 - DNA, 352 bp, Homo sapiens
caggtgcagctggtgcaatctgggggaggcttggtccagtctgggaagtccgtgagactctcttgtgcagcctctggattcacatttggtgattatgccatgcactgggtccggcaagctccaggaaagggcctggagtgggtcgcaggcattactaggaatagtggtcgcatagcctatgcggactttgtgaagggccgattcatcatctccagagacaacgccaagaactcactgtatctgcaaatgaacagcctgagagccgaggacacggctgtgtattactgtgcgagcgaaatgactggggcttatgatatttggggccaagggaccacggtcaccgtctcctcag

SEQ ID NO: 1775 - DNA, 325 bp, Homo sapiens
tcttctgagctgactcaggaccctgctgtgtctgtggccttgggacagacagtcaggatcacatgccaaggagacggcctcagatactattatgcaagctggtaccagcagaagccaggacaggcccctatacttgtcctctttggtaaaaacaaccggccctcagggatcccagaccgattctctggctccagctcaggaaatacagcttccttgaccatcactggggctcaggcggaagatgaggctgactattactgtaactcgcgggacagcagtggtaaccatcgattcttcggaactgggaccaaggtcaccgtcctaa

SEQ ID NO: 1776 - DNA, 361 bp, Homo sapiens
caggtgcagctggtgcagtctgggggaggcgtggtccagcctgggaggtccctgagactctcctgtgcagcctctggattcaccttcagtagctatgctatgcactgggtccgccaggctccaggcaaggggctggagtgggtggcagttatatcatatgatggaagcaataaatactacgcagactccgtgaagggccgattcaccatctccagagacaattccaagaacacgctgtatctgcaaatgaacagcctgagagctgaggacacggctgtatattactgtgcgaaagaggattactatgatagtagtggttcgaactactggggccagggaaccctggtcaccgtctcctcag

SEQ ID NO: 1777 - DNA, 331 bp, Homo sapiens
ctgcctgtgctgactcagccaccctcagcgtctgggacccccgggcagagggtcaccatctcttgttctggaagcagctccaacatcggaagtaattatgtatactggtaccagcagctcccaggaacggcccccaaactcctcacctataggaatgatcagcggccctcaggggtccctgaccgattctctggctccaagtctggcacctcagcctccctggccatcagtgggctccggtccgaggatgaggctgattatttctgttcagcttgggatgacagcctgggtggcgaggtcttcggaactgggaccaaggtcaacgtcctag

SEQ ID NO: 1778 - DNA, 355 bp, Homo sapiens
caggtgcagctggtgcagtctgggggaggcttggtacagcctggggggtccctgagactctcctgtgcagcctctggattcacctttagcagccatgccatgagctgggtccgccaggctccagggaaggggctggagtgggtctcagctattagtggtagtggtggtagcacatactacgcagactccgtgaagggccggttcaccatctccagagacaattccaagaacacgctgtatctgcaaatgaacagcctgagagccgaggacacggccgtatattactgtgcgaaaatcggtacggcggatgcttttgatatctggggccaagggaccacggtcaccgtctcctcag

SEQ ID NO: 1779 - DNA, 331 bp, Homo sapiens
cagtctgccctgactcagccaccctcagtgtctgggacccccggacagagggtcaccatctcttgttctggaggcgtccccaacatcggaagtaatcctgtaaactggtacctccaccgcccaggaacggcccccaaactcctcatctataatagcaatcagtggccctcaggggtccctgaccgattttctggctccaggtctggcacctcagcctccctggccatcagtgggctccagtctgaggatgaggctgattattactgtgcagcatgggatgacagcctggatggtctggttttcggcggagggaccaagttgaccgtcctag

SEQ ID NO: 1780 - DNA, 373 bp, Homo sapiens
caggtgcagctggtgcagtctggggctgaggtgaagaagcctggggcctcagtgaaggtttcctgcaaggcatctggatacaccttcaccagctactatatgcactgggtgcgacaggcccctggacaagggcttgagtggatgggaataatcaaccctagtggtggtagcacaagctacgcacagaagttccagggcagagtcaccatgaccagggacacgtccacgagcacagtctacatggagctgagcagcctgagatctgaggacacggccgtgtattactgtgctagagaaaaaagcagcagctggtacgggggggacaactggttcgacccctggggccagggcaccctggtcaccgtctcctcag

SEQ ID NO: 1781 - DNA, 331 bp, Homo sapiens
cagtctgccctgactcagcctcgctcagtgtccgggtctcctggacagtcagtcaccatctcctgcactggaagcagcagtgatgttggtggttatcattatgtctcctggtaccaacaatacccaggcaaagtccccaaactgatgatttatgatgtctctaggcggccctcaggggtttctgatcgcttctctggctccaagtctggcagcacggcctccctgaccatctctgggctccaggctgaggacgaggctgattattactgcagctcatatacaagcagcagcactgtggtcttcggcggagggaccaagctgaccgtcctac

SEQ ID NO: 1782 - DNA, 390 bp, Homo sapiens
caggtgcagctggtgcaatctggagctgaggtgaagaagcctggggcctcagtgaaggtctcctgcaaggcttctggttacacctttaccagctatggtatcagctgggtgcgacaggcccctggacaagggcttgagtggatgggatggatcagcgcttacaatggtaacacaaactatgcacagaagctccagggcagagtcaccatgaccacagacacatccacgagcacagcctacatggagctgaggagcctgagatctgacgacacggccgtgtattactgtgcgagagatgtacaccccttagatatagcagtggctgccgacgattactactactacggtatggacgtctggggccaaggcaccctggtcaccgtctcctca

SEQ ID NO: 1783 - DNA, 325 bp, Homo sapiens
tcttctgagctgactcaggaccctgctgtgtctgtggccttgggacagacagtcaggatcacatgccaaggagacagcctcacaaccaattatgcaagctggtaccagcagaagccaggacaggcccctgttcttgtcatctatggtaaaaacaagcggccctcagggatcccagaccgattctctggctccatctcagggaacacagcttccttgaccatcactggggctcaggcggaggatgaggctgactattactgtaactcccgggacagcagtggtaagcattatgtcttcggaactgggaccaaggtcaccgtcctag

SEQ ID NO: 1784 - DNA, 367 bp, Homo sapiens
gaggtgcagctggtggagtctgggggaggcgtggtccagcctgggaggtccctgagactctcctgtgcagcctctggattcacctttagcagctatgccatgagctgggtccgccaggctccagggaaggggctggagtgggtctcagctattagtggtagtggtggtagcacatactacgcagactccgtgaagggccggttcaccatctccagagacaattccaagaacacgctgtatctgcaaatgaacagcctgagagccgaggacacggccgtatattactgtgcgaaagattggggcctagtacaactggaatccggctatgactactggggccagggaaccctggtcaccgtctcctcag

SEQ ID NO: 1785 - DNA, 334 bp, Homo sapiens
cagtctgtgctgactcagccaccctcagtgtctggggccccagggcagagggtcaccatctcctgcactgggagcagctccaacatcggggcaggttatgatgtacactggtaccaacagcttccaggaaaagcccccaaactcctcatctatgataataccaatcggccctcgggggtccctgaccgattctctggctccaagtctggcacctcagcctccctggccatcagtgggctccagtctgaggatgaggctgattattactgtgcagcatgggatgaaagcctgaatggtcaggtcttcggaactgggaccaaggtcaccgtcctag

SEQ ID NO: 1786 - DNA, 367 bp, Homo sapiens
caggtacagctgcagcagtcaggcccaggactggtgaagccttcggggaccctgtccctcacctgcgctgtctctggtggctccatcagcagtagtgactggtggagttgggtccgccaggtcccagggaaggggctggagtggattggggaaatctatcacagtggcagtcccaactacaacccgtccctcaggggtcgagtcaccatatcagtagacaagtcgaagaaccagttctccctgaagctgagctctgtgaccgccgcggacacggccgtctattactgtgcgagagaaagagttgctcctacagtagacggtgcttttgatgtctggggccaagggacaatggtcaccgtctcctcag

SEQ ID NO: 1787 - DNA, 322 bp, Homo sapiens
gacatcgtgatgacccagtctccatcctccctgtctgcatctgtaggagacagagtcaccatcacttgccgggcaagtcagagcattaccacctatttaaattggtatcagcagaaaccagggaaagcccctaagctcctgatctatgctgcatccagtttgcaaagtggggtcccatcaaggttcagtggcagtggatctgggacagaattcactctcactatcagcagcctgcagcctgaagattttgcaacttattattgtcaacaggccagcagtttccctctcactttcggcggagggaccaaggtggatctcaaac

SEQ ID NO: 1788 - DNA, 364 bp, Homo sapiens
gaggtgcagctggtgcagtctggagctgaggtgaaaaagcccggggagtctctgaagatctcctgtaagggttcgggatacagctttaccaactactggatcggctgggtgcgccagatgcccgggaaaggcctggagtggattgggatcatctatcctggtgactctgataccagatacagcccgtccttccaaggccaggtcaccatctcagccgacaagtccaccagcactgcctacctgcagtggagcagcctgaaggcctcggacaccgccatgtattactgtgcgaggataaagagttactatgatagtagtggttattacctctggggccagggaaccctggtcaccgtctcctcag

SEQ ID NO: 1789 - DNA, 322 bp, Homo sapiens
cagtctgtgctgactcagccaccctcggtgtcagtggccccaggacagacggccagcataacctgtgggggaaacaacattgggagtaaaagtgtgcactggtaccagcagaagccaggccaggcccctgtcctggtcgtctatgatgatagcgaccggccctcagggatccctgagcgattctctggctccaactctgggaacacggccaccctgaccatcagcagggtcgaagccggggatgaggccgactattactgtcaggtgtgggatagtagtagtgaagaggtattcggcggagggaccaagctgaccgtcctag

SEQ ID NO: 1790 - DNA, 346 bp, Homo sapiens
gaggtgcagctggtgcagtctgggggaggcttggtacagcctggggggtccctgagactctcctgtgcagcctctggattcacctttagcagctatgccatgagctgggtccgccaggctccagggaaggggctggagtgggtctcagctattagtggtagtggtggtagcacatactacgcagactccgtgaagggccggttcaccatctccagagacaattccaagaacacgctgtatctgcaaatgaacagcctgagagccgacgacacggctgtctattactgtgcgagaagggggttcatggacgtctggggcaaaggcaccctggtcaccgtctcctcag

SEQ ID NO: 1791 - DNA, 325 bp, Homo sapiens
tcttctgagctgactcaggaccctgctgtgtctgtggccttgggacagacagtcaccatcacatgccaaggagacatcctcgaagcctattatgcaagttggtaccagcagaggccaggacaggcccctgtccttgtcatctatggcgaaaacaaccggccctcagggatcccagaccggttctctggctccaggtcaggaaacacagcctccttgaccatcactggggctcaggcggaagatgaggctgactattattgtaactctcgggacagcagtggtagccatgtggtattcggcggagggaccaagatgaccgtcctgg

SEQ ID NO: 1792 - DNA, 346 bp, Homo sapiens
caggtgcagctggtgcagtctgggggaggcttggtacagcctggggggtccctgagactctcctgtgcagcctctggattcacctttaacagctttgccatgacctgggtccgccaggctccagggaaggggctggagtgggtctcaggtattagtggtagtggtggtagcacatactacgcagactccgtgaagggccggttcaccatctccagagacaattccaagaacacgctgtatctgcaaatgaacagcctgagagccgaggacacggccgtatattactgtgcgaaagggcacgcttttgatatctggggccaagggaccacggtcaccgtctcctcag

SEQ ID NO: 1793 - DNA, 337 bp, Homo sapiens
gacatcgtgatgacccagtctccactctctctgtccgtcacccctgggcagccggcctccatctcctgcaagtctagtcagagcctcctgcatagtgatggaaagacctatttgtattggtacctgcagaagccaggccagcctccacaactcctgatctatgaagtttccaaccggttctctggagtgccagataggttcagtggcagcgggtcagggacagatttcacactgaaaatcagccgggtggaggctgaggatgttggggtttattactgcatgcaaagtatacagcttcctctcactttcggcggagggaccaaggtggagatcaaac

SEQ ID NO: 1794 - DNA, 352 bp, Homo sapiens
caggtgcagctggtgcagtctgggggaggcttggtacagcctggggggtccctgagactctcctgtgcagcctctggattcacctttagcagctatgccatgagctgggtccgccaggctccagggaaggggctggagtgggtctcagctattagtggtagtggtggtagcacatactacgcagactccgtgaagggccggttcaccatctccagagacaattccaagaacacgctgtatctgcaaatgaacagcctgagagccgaggacacggctgtgtattactgtgcgaaagataaaggtggggggttcgacccctggggccagggaaccctggtcaccgtctcctcag

SEQ ID NO: 1795 - DNA, 331 bp, Homo sapiens
aattttatgctgactcagccccactctgtgtcggagtctccggggaagacggtaaccatctcctgcacccgcagcagtggcagcattgccagcaactatgtgcagtggtaccagcagcgcccgggcagttcccccaccactgtgatctatgaggataaccaaagaccctctggggtccctgatcggttctctggctccatcgacagctcctccaactctgcctccctcaccatctctggactgaagactgaggacgaggctgactactactgtcagtcttatgatagtacctctcatgtcttcggaactgggacccaggtcaccgtcctag

SEQ ID NO: 1796 - DNA, 373 bp, Homo sapiens
gaggtgcagctggtgcagtctggagcagaggtgaaaaagcccggggagtctctgaagatctcctgtaagggttctggatacagctttaccaactactggatcggctgggtgcgccagatgcccgggaaaggcctggagtgggtggggatcatctatcctggtgactctgataccagatacagcccgtccttccaaggccaggtcaccatctcagccgacaagtccatcagcaccgcctacctgcagtggagcagcctgaaggcctcggacaccgccatgtattactgtgcgagaccagggtattactatggttcggggagttattataacgttgactactggggccagggcaccctggtcaccgtctcctcag

SEQ ID NO: 1797 - DNA, 322 bp, Homo sapiens
cagcctgggctgactcagccaccctcagtgtccgtgtccccaggacagacagccagcatcacctgctctggagatgaattgggggataaatttgctttctggtatcaacaaaagccaggccagtcccctgtgctggtcatctatcaagatagtaagaggccctcagggatccctgagcgattctctggctccatctctgggaacacggccaccctgactatcagcagggtcgaggccggagatgaggccgactatttctgtcaggtgtgggatagcaatggtggtcccccattcgggagagggaccaagctgaccgtcctag

SEQ ID NO: 1798 - protein, 121 aa, Homo sapiens
QVQLVQSGGGVVQPGGSLRLSCAASGFTFDDYAMHWVRQAPGKGLEWVSSLSWNTGRVAYADSVKGRFTISRDNAKNSLYLQMNSLRPEDTAFYYCAKGSALGLVGWFDAWGQGTLVTVSS

SEQ ID NO: 1799 - protein, 107 aa, Homo sapiens
SSELTQDPAVSVALGQTVRITCQGDSLRTYYGSWYQQKPGQAPLLVFYGKESRPSGIPDRFSGSTSGNTASLTITGAQAEDEADYYCNSQDSSGDLLFGGGTKLTVL

SEQ ID NO: 1800 - protein, 117 aa, Homo sapiens
QVQLVQSGGGLVQSGKSVRLSCAASGFTFGDYAMHWVRQAPGKGLEWVAGITRNSGRIAYADFVKGRFIISRDNAKNSLYLQMNSLRAEDTAVYYCASEMTGAYDIWGQGTTVTVSS

SEQ ID NO: 1801 - protein, 108 aa, Homo sapiens
SSELTQDPAVSVALGQTVRITCQGDGLRYYYASWYQQKPGQAPILVLFGKNNRPSGIPDRFSGSSSGNTASLTITGAQAEDEADYYCNSRDSSGNHRFFGTGTKVTVL

SEQ ID NO: 1802 - protein, 120 aa, Homo sapiens
QVQLVQSGGGVVQPGRSLRLSCAASGFTFSSYAMHWVRQAPGKGLEWVAVISYDGSNKYYADSVKGRFTISRDNSKNTLYLQMNSLRAEDTAVYYCAKEDYYDSSGSNYWGQGTLVTVSS

SEQ ID NO: 1803 - protein, 110 aa, Homo sapiens
LPVLTQPPSASGTPGQRVTISCSGSSSNIGSNYVYWYQQLPGTAPKLLTYRNDQRPSGVPDRFSGSKSGTSASLAISGLRSEDEADYFCSAWDDSLGGEVFGTGTKVNVL

SEQ ID NO: 1804 - protein, 118 aa, Homo sapiens
QVQLVQSGGGLVQPGGSLRLSCAASGFTFSSHAMSWVRQAPGKGLEWVSAISGSGGSTYYADSVKGRFTISRDNSKNTLYLQMNSLRAEDTAVYYCAKIGTADAFDIWGQGTTVTVSS

SEQ ID NO: 1805 - protein, 110 aa, Homo sapiens
QSALTQPPSVSGTPGQRVTISCSGGVPNIGSNPVNWYLHRPGTAPKLLIYNSNQWPSGVPDRFSGSRSGTSASLAISGLQSEDEADYYCAAWDDSLDGLVFGGGTKLTVL

SEQ ID NO: 1806 - protein, 124 aa, Homo sapiens
QVQLVQSGAEVKKPGASVKVSCKASGYTFTSYYMHWVRQAPGQGLEWMGIINPSGGSTSYAQKFQGRVTMTRDTSTSTVYMELSSLRSEDTAVYYCAREKSSSWYGGDNWFDPWGQGTLVTVSS

SEQ ID NO: 1807 - protein, 110 aa, Homo sapiens
QSALTQPRSVSGSPGQSVTISCTGSSSDVGGYHYVSWYQQYPGKVPKLMIYDVSRRPSGVSDRFSGSKSGSTASLTISGLQAEDEADYYCSSYTSSSTVVFGGGTKLTVL

SEQ ID NO: 1808 - protein, 130 aa, Homo sapiens
QVQLVQSGAEVKKPGASVKVSCKASGYTFTSYGISWVRQAPGQGLEWMGWISAYNGNTNYAQKLQGRVTMTTDTSTSTAYMELRSLRSDDTAVYYCARDVHPLDIAVAADDYYYYGMDVWGQGTLVTVSS

SEQ ID NO: 1809 - protein, 108 aa, Homo sapiens
SSELTQDPAVSVALGQTVRITCQGDSLTTNYASWYQQKPGQAPVLVIYGKNKRPSGIPDRFSGSISGNTASLTITGAQAEDEADYYCNSRDSSGKHYVFGTGTKVTVL

SEQ ID NO: 1810 - protein, 122 aa, Homo sapiens
EVQLVESGGGVVQPGRSLRLSCAASGFTFSSYAMSWVRQAPGKGLEWVSAISGSGGSTYYADSVKGRFTISRDNSKNTLYLQMNSLRAEDTAVYYCAKDWGLVQLESGYDYWGQGTLVTVSS

SEQ ID NO: 1811 - protein, 111 aa, Homo sapiens
QSVLTQPPSVSGAPGQRVTISCTGSSSNIGAGYDVHWYQQLPGKAPKLLIYDNTNRPSGVPDRFSGSKSGTSASLAISGLQSEDEADYYCAAWDESLNGQVFGTGTKVTVL

SEQ ID NO: 1812 - protein, 122 aa, Homo sapiens
QVQLQQSGPGLVKPSGTLSLTCAVSGGSISSSDWWSWVRQVPGKGLEWIGEIYHSGSPNYNPSLRGRVTISVDKSKNQFSLKLSSVTAADTAVYYCARERVAPTVDGAFDVWGQGTMVTVSS

SEQ ID NO: 1813 - protein, 107 aa, Homo sapiens
DIVMTQSPSSLSASVGDRVTITCRASQSITTYLNWYQQKPGKAPKLLIYAASSLQSGVPSRFSGSGSGTEFTLTISSLQPEDFATYYCQQASSFPLTFGGGTKVDLK

SEQ ID NO: 1814 - protein, 121 aa, Homo sapiens
EVQLVQSGAEVKKPGESLKISCKGSGYSFTNYWIGWVRQMPGKGLEWIGIIYPGDSDTRYSPSFQGQVTISADKSTSTAYLQWSSLKASDTAMYYCARIKSYYDSSGYYLWGQGTLVTVSS

SEQ ID NO: 1815 - protein, 107 aa, Homo sapiens
QSVLTQPPSVSVAPGQTASITCGGNNIGSKSVHWYQQKPGQAPVLVVYDDSDRPSGIPERFSGSNSGNTATLTISRVEAGDEADYYCQVWDSSSEEVFGGGTKLTVL

SEQ ID NO: 1816 - protein, 115 aa, Homo sapiens
EVQLVQSGGGLVQPGGSLRLSCAASGFTFSSYAMSWVRQAPGKGLEWVSAISGSGGSTYYADSVKGRFTISRDNSKNTLYLQMNSLRADDTAVYYCARRGFMDVWGKGTLVTVSS

SEQ ID NO: 1817 - protein, 108 aa, Homo sapiens
SSELTQDPAVSVALGQTVTITCQGDILEAYYASWYQQRPGQAPVLVIYGENNRPSGIPDRFSGSRSGNTASLTITGAQAEDEADYYCNSRDSSGSHVVFGGGTKMTVL

SEQ ID NO: 1818 - protein, 115 aa, Homo sapiens
QVQLVQSGGGLVQPGGSLRLSCAASGFTFNSFAMTWVRQAPGKGLEWVSGISGSGGSTYYADSVKGRFTISRDNSKNTLYLQMNSLRAEDTAVYYCAKGHAFDIWGQGTTVTVSS

SEQ ID NO: 1819 - protein, 112 aa, Homo sapiens
DIVMTQSPLSLSVTPGQPASISCKSSQSLLHSDGKTYLYWYLQKPGQPPQLLIYEVSNRFSGVPDRFSGSGSGTDFTLKISRVEAEDVGVYYCMQSIQLPLTFGGGTKVEIK

SEQ ID NO: 1820 - protein, 117 aa, Homo sapiens
QVQLVQSGGGLVQPGGSLRLSCAASGFTFSSYAMSWVRQAPGKGLEWVSAISGSGGSTYYADSVKGRFTISRDNSKNTLYLQMNSLRAEDTAVYYCAKDKGGGFDPWGQGTLVTVSS

SEQ ID NO: 1821 - protein, 110 aa, Homo sapiens
NFMLTQPHSVSESPGKTVTISCTRSSGSIASNYVQWYQQRPGSSPTTVIYEDNQRPSGVPDRFSGSIDSSSNSASLTISGLKTEDEADYYCQSYDSTSHVFGTGTQVTVL

SEQ ID NO: 1822 - protein, 124 aa, Homo sapiens
EVQLVQSGAEVKKPGESLKISCKGSGYSFTNYWIGWVRQMPGKGLEWVGIIYPGDSDTRYSPSFQGQVTISADKSISTAYLQWSSLKASDTAMYYCARPGYYYGSGSYYNVDYWGQGTLVTVSS

SEQ ID NO: 1823 - protein, 107 aa, Homo sapiens
QPGLTQPPSVSVSPGQTASITCSGDELGDKFAFWYQQKPGQSPVLVIYQDSKRPSGIPERFSGSISGNTATLTISRVEAGDEADYFCQVWDSNGGPPFGRGTKLTVL

SEQ ID NO: 1824 - protein, 8 aa, Homo sapiens
GFTFDDYA

SEQ ID NO: 1825 - protein, 8 aa, Homo sapiens
LSWNTGRV

SEQ ID NO: 1826 - protein, 14 aa, Homo sapiens
AKGSALGLVGWFDA

SEQ ID NO: 1827 - protein, 6 aa, Homo sapiens
SLRTYY

SEQ ID NO: 1828 - protein, 3 aa, Homo sapiens
GKE

SEQ ID NO: 1829 - protein, 10 aa, Homo sapiens
NSQDSSGDLL

SEQ ID NO: 1830 - protein, 8 aa, Homo sapiens
GFTFGDYA

SEQ ID NO: 1831 - protein, 8 aa, Homo sapiens
ITRNSGRI

SEQ ID NO: 1832 - protein, 10 aa, Homo sapiens
ASEMTGAYDI

SEQ ID NO: 1833 - protein, 6 aa, Homo sapiens
GLRYYY

SEQ ID NO: 1834 - protein, 3 aa, Homo sapiens
GKN

SEQ ID NO: 1835 - protein, 11 aa, Homo sapiens
NSRDSSGNHRF

SEQ ID NO: 1836 - protein, 8 aa, Homo sapiens
GFTFSSYA

SEQ ID NO: 1837 - protein, 8 aa, Homo sapiens
ISYDGSNK

SEQ ID NO: 1838 - protein, 13 aa, Homo sapiens
AKEDYYDSSGSNY

SEQ ID NO: 1839 - protein, 8 aa, Homo sapiens
SSNIGSNY

SEQ ID NO: 1840 - protein, 3 aa, Homo sapiens
RND

SEQ ID NO: 1841 - protein, 11 aa, Homo sapiens
SAWDDSLGGEV

SEQ ID NO: 1842 - protein, 8 aa, Homo sapiens
GFTFSSHA

SEQ ID NO: 1843 - protein, 8 aa, Homo sapiens
ISGSGGST

SEQ ID NO: 1844 - protein, 11 aa, Homo sapiens
AKIGTADAFDI

SEQ ID NO: 1845 - protein, 8 aa, Homo sapiens
VPNIGSNP

SEQ ID NO: 1846 - protein, 3 aa, Homo sapiens
NSN

SEQ ID NO: 1847 - protein, 11 aa, Homo sapiens
AAWDDSLDGLV

SEQ ID NO: 1848 - protein, 8 aa, Homo sapiens
GYTFTSYY

SEQ ID NO: 1849 - protein, 8 aa, Homo sapiens
INPSGGST

SEQ ID NO: 1850 - protein, 17 aa, Homo sapiens
AREKSSSWYGGDNWFDP

SEQ ID NO: 1851 - protein, 9 aa, Homo sapiens
SSDVGGYHY

SEQ ID NO: 1852 - protein, 3 aa, Homo sapiens
DVS

SEQ ID NO: 1853 - protein, 10 aa, Homo sapiens
SSYTSSSTVV

SEQ ID NO: 1854 - protein, 8 aa, Homo sapiens
GYTFTSYG

SEQ ID NO: 1855 - protein, 8 aa, Homo sapiens
ISAYNGNT

SEQ ID NO: 1856 - protein, 23 aa, Homo sapiens
ARDVHPLDIAVAADDYYYYGMDV

SEQ ID NO: 1857 - protein, 6 aa, Homo sapiens
SLTTNY

SEQ ID NO: 1858 - protein, 3 aa, Homo sapiens
GKN

SEQ ID NO: 1859 - protein, 11 aa, Homo sapiens
NSRDSSGKHYV

SEQ ID NO: 1860 - protein, 8 aa, Homo sapiens
GFTFSSYA

SEQ ID NO: 1861 - protein, 8 aa, Homo sapiens
ISGSGGST

SEQ ID NO: 1862 - protein, 15 aa, Homo sapiens
AKDWGLVQLESGYDY

SEQ ID NO: 1863 - protein, 9 aa, Homo sapiens
SSNIGAGYD

SEQ ID NO: 1864 - protein, 3 aa, Homo sapiens
DNT

SEQ ID NO: 1865 - protein, 11 aa, Homo sapiens
AAWDESLNGQV

SEQ ID NO: 1866 - protein, 9 aa, Homo sapiens
GGSISSSDW

SEQ ID NO: 1867 - protein, 7 aa, Homo sapiens
IYHSGSP

SEQ ID NO: 1868 - protein, 15 aa, Homo sapiens
ARERVAPTVDGAFDV

SEQ ID NO: 1869 - protein, 6 aa, Homo sapiens
QSITTY

SEQ ID NO: 1870 - protein, 3 aa, Homo sapiens
AAS

SEQ ID NO: 1871 - protein, 9 aa, Homo sapiens
QQASSFPLT

SEQ ID NO: 1872 - protein, 8 aa, Homo sapiens
GYSFTNYW

SEQ ID NO: 1873 - protein, 8 aa, Homo sapiens
IYPGDSDT

SEQ ID NO: 1874 - protein, 14 aa, Homo sapiens
ARIKSYYDSSGYYL

SEQ ID NO: 1875 - protein, 6 aa, Homo sapiens
NIGSKS

SEQ ID NO: 1876 - protein, 3 aa, Homo sapiens
DDS

SEQ ID NO: 1877 - protein, 10 aa, Homo sapiens
QVWDSSSEEV

SEQ ID NO: 1878 - protein, 8 aa, Homo sapiens
GFTFSSYA

SEQ ID NO: 1879 - protein, 8 aa, Homo sapiens
ISGSGGST

SEQ ID NO: 1880 - protein, 8 aa, Homo sapiens
ARRGFMDV

SEQ ID NO: 1881 - protein, 6 aa, Homo sapiens
ILEAYY

SEQ ID NO: 1882 - protein, 3 aa, Homo sapiens
GEN

SEQ ID NO: 1883 - protein, 11 aa, Homo sapiens
NSRDSSGSHVV

SEQ ID NO: 1884 - protein, 8 aa, Homo sapiens
GFTFNSFA

SEQ ID NO: 1885 - protein, 8 aa, Homo sapiens
ISGSGGST

SEQ ID NO: 1886 - protein, 8 aa, Homo sapiens
AKGHAFDI

SEQ ID NO: 1887 - protein, 11 aa, Homo sapiens
QSLLHSDGKTY

SEQ ID NO: 1888 - protein, 3 aa, Homo sapiens
EVS

SEQ ID NO: 1889 - protein, 9 aa, Homo sapiens
MQSIQLPLT

SEQ ID NO: 1890 - protein, 8 aa, Homo sapiens
GFTFSSYA

SEQ ID NO: 1891 - protein, 8 aa, Homo sapiens
ISGSGGST

SEQ ID NO: 1892 - protein, 10 aa, Homo sapiens
AKDKGGGFDP

SEQ ID NO: 1893 - protein, 8 aa, Homo sapiens
SGSIASNY

SEQ ID NO: 1894 - protein, 3 aa, Homo sapiens
EDN

SEQ ID NO: 1895 - protein, 9 aa, Homo sapiens
QSYDSTSHV

SEQ ID NO: 1896 - protein, 8 aa, Homo sapiens
GYSFTNYW

SEQ ID NO: 1897 - protein, 8 aa, Homo sapiens
IYPGDSDT

SEQ ID NO: 1898 - protein, 17 aa, Homo sapiens
ARPGYYYGSGSYYNVDY

SEQ ID NO: 1899 - protein, 6 aa, Homo sapiens
ELGDKF

SEQ ID NO: 1900 - protein, 3 aa, Homo sapiens
QDS

SEQ ID NO: 1901 - protein, 10 aa, Homo sapiens
QVWDSNGGPP

SEQ ID NO: 1902 - protein, 15 aa, Artificial Sequence
  Description of Artificial Sequence: Synthetic peptide
EPKSCDKTHTCPPCP

SEQ ID NO: 1903 - protein, 12 aa, Artificial Sequence
  Description of Artificial Sequence: Synthetic peptide
ERKCCVECPPCP

SEQ ID NO: 1904 - protein, 12 aa, Artificial Sequence
  Description of Artificial Sequence: Synthetic peptide
ESKYGPPCPSCP

SEQ ID NO: 1905 - protein, 13 aa, Artificial Sequence
  Description of Artificial Sequence: Synthetic peptide
APELLGGPDVFLF

SEQ ID NO: 1906 - protein, 24 aa, Artificial Sequence
  Description of Artificial Sequence: Synthetic peptide
  MISC_FEATURE (1)..(24): This sequence may encompass 1-6 "Gly Gly Gly Ser" repeating units
GGGSGGGSGGGSGGGSGGGSGGGS

SEQ ID NO: 1907 - protein, 30 aa, Artificial Sequence
  Description of Artificial Sequence: Synthetic polypeptide
  MISC_FEATURE (1)..(30): This sequence may encompass 1-6 "Gly Gly Gly Gly Ser" repeating units
GGGGSGGGGSGGGGSGGGGSGGGGSGGGGS

SEQ ID NO: 1908 - protein, 12 aa, Artificial Sequence
  Description of Artificial Sequence: Synthetic peptide
GSAGSAAGSGEF

SEQ ID NO: 1909 - protein, 30 aa, Artificial Sequence; identical to SEQ ID NO: 1907
  Description of Artificial Sequence: Synthetic polypeptide

SEQ ID NO: 1910 - protein, 55 aa, Artificial Sequence
  Description of Artificial Sequence: Synthetic polypeptide
GGGSGGGSGGGSGGGSEPKSCDKTHTCPPCPGGGSGGGSGGGSGGGSGGGSGGGS

SEQ ID NO: 1911 - protein, 31 aa, Artificial Sequence
  Description of Artificial Sequence: Synthetic polypeptide
GGGSGGGSGGGSGGGSEPKSCDKTHTCPPCP

SEQ ID NO: 1912 - protein, 4 aa, Artificial Sequence
  Description of Artificial Sequence: Synthetic peptide
GGGS

SEQ ID NO: 1913 - protein, 51 aa, Artificial Sequence
  Description of Artificial Sequence: Synthetic polypeptide
GGGSGGGSGGGSEPKSCDKTHTCPPCPGGGSGGGSGGGSGGGSGGGSGGGS

SEQ ID NO: 1914 - protein, 12 aa, Artificial Sequence
  Description of Artificial Sequence: Synthetic peptide
GGGSGGGSGGGS

SEQ ID NO: 1915 - protein, 37 aa, Artificial Sequence
  Description of Artificial Sequence: Synthetic polypeptide
APELLGGPDVFLFGGGSGGGSGGGSGGGSGGGSGGGS
